United States Patent Application Publication US 2025/0051766 A1 - sequence listing, part 26

SEQ ID NO: 5065 - DNA, 58617616 bp, Homo sapiens (residues 52,104,553-54,275,575 of 58,617,616)
  source 1..58617616: mol_type = genomic DNA
gaaatccagaagagacatatttggcttatttggtataaaaatcatacaggaagcattgtcaaatacaaaatggtgtttggctttctgtgggctgtacttgtataaatatgaaattggcatgtattccaaaattatggaaaactcttataattctgatatgacttactatatgttattattttattttttgagatggaatctcactctgtcacccaggctggagtgcagtggcaccatcttggctcactgcaacctctgcatcctgggttcaagcaattcccctgcattagcctcgcaagtacctgagactataggtgtgcaccatcacacctggttaatgtttgtatttttagtagagatgcggtttcaccatgttggtcaggctggtcttgaactcctgacctcaacccacctcagcctcacaaagtgctgcaattacagatgtgagtgactgtgcccagccacatgttattaataattataattgttggctgggcatggtggctcaaacctataatcccaaaactttgggaggccaaggcaggcggatcacctgaggtcaggagttcaagaccagcctgaccaacatggagaaaccccatctctactaaaaatacaaaattagtcgggtgtagtggcgcatgcctgtagtcccagctactcagaaggctgaggcaggagaatcgcttgaaccccagaggagaggttgtggtgagcccagattgtgccactgcactccagcctgggcaacaagagcaaaactctgtctcaaaaaataataataattattattattattgactattatgtaaaatggtggtatgtcacagaagtaaccaaaatttccattatagtcaattgtggttttaataacagctgtcctgagacattttgttgccacaggcaattgttgtcttgtttggatcctcttcaaaagttggtttataatcagctacaggaatttgataggtgctctggaatgcaagtttctgataactttggaaaatgtgacattagaatagaggaatagaggaaagaactttcaaaactttcatggataactaaaatgttcatgaatatcaaacacaacacacattaactgcatggactgaactaataggagtctaaagtaatctttctgattttttcttttgatcctttgttttgttttgcagagtcaaggaaacttttcttttgagctattgacagcaattttttttttttttgagacagttgcccaggctggagtgcaatggcatgatctgggttcactgcagcccctgcctcccagcctcccaggttcaagcgattctcctgcctcagcctcccaagtagctgggattacaggcacccaccatcatgcccaggtaatttttgtagagacggggtttcaccatgttggccaggctgatctcgaactcctgacctaaggtgatccgcccaccttgcctcccaaagtgctgggattataggcatgagccaccgtgcccagccgacagcatttaacaattgaggaaagtatactgctgtgaagaaaatttggaacatatttgtttctctctacctgctttctccagaatttggaaactatttctgagtattcttttttttttttttttttttttttgagatggagtctcactctgttgccaggctggaatgcagtggcacgatcttggctcactgcaacctctgcctcccgaggtcaagcgattctcctgcctcagcctcctgagtagctgggactacaggcatgtgccaacacacccagctaatttttgtatttttagtagagacggggtttcaccatgttggccaggatggtcttgatctcttgacctcgtgatctgcctgcctcagcctcccaaagtgctgggattacaggcgtgagccatggcgcccagcttacgtttttcaatttttatgattttccacagtttggactgaattctaattttttccagctacatgtctctgaaataatgttttcaattttttcttctttcttttcttttttcccccatattttctaatttgaaatcactgaaaactaaactgtattttcttgaagccctgataactgaagctagacaacttaaacttcagaagaaaataacagcaacctattcacatacataagccactttcatacctatctactgatgtatggacttcagagtaatatggcctgtatctattttccaggattattctttgtttttcttccttcctcctgctattttctcttcataggacacgacactttacaaactgctaaaaatgagctttccaaataacatgggacttgcccacctgaaaataaactgtcctagccatgaaggatcagatgaaacctgatttttttttttttgagacggagtctcgttctgtccccaggctggagtgcagtaacgtaatctgggctcactgcaacctctgccttgcaggttcaagtgattctcctgcctcagcctcctgagtagctgggactacaggcatgtgccactacgcctggctaatttttgtatttttagtagagatggggtttcaccacgttggccaggatggtctccatctcttgacctcgtgatccgcccgccttggcctcccaaaatgctgagattacaggcgtgagccaccgcacccagcctctcccaaagatttttaaaggagaaaaggggaaatgtgaaaggaaaataaatcttggcacccaacactcactaagccaaagggaaaagtcaagctgggaactgcttagggcaaacatgcttcccattctattcaaatcatccctctgctcactgagataaatgtgtgtgattgcttcctttgaaaatgcttaccagaaacccaaaagaatgcaacctttgtcttttatctacccgatgacctggaagcaccctccctgcttggacttaccctgcctttccaaaccaaaccaatgtgcatcttacacattaactgatatctcctaaaagtgtataaaaccaagctgcgccccaaccaccttgggtatatgtggccaggacctcttgaggctgtgtcacaggcaagcatccttaactttggcaaataaacttgcaaaattgactggaacaaaagaagtaatcttcagagaaaataaaaataacagggaaaaacagggagattacatgataaaaatgtcaacttacaaagatgatttcagaaccatcagtgtgtatgcactaaaaaacagctgcaaaacgtgaagcaataagtgacagaagtgaaagaaatacacaaatttagactgagcaaagaggattattagggtagtcaaagtactctgtatgttaccataatatgtgaatatgtgccattttacagttgtccaaacccacacaatgtacaagtgtgagccaactataaactagggatgttggatgataatctaccactttggtggaggatgttgacaatggggaaggctatgcatatgtgggggaaggagctatatgagaaatctctgtaccttccactgaattttgctgggaaccaaaaattgctctacaaagtaaagtatatcatagaaaaaaaattgaattagaaaataggttaaaaatatgagaaatttcaccgatgcagatgcacaaataggcaaacgaaaagattttccatattactgtccatcaagtctcagaaattaacaatgttctatttctttattgtaattgaaaactgaacagcaaatgaatttttatggtttgttttctccaacaaacttaataatattaaaatatgtgagaaataatatttattgcaacaggttatgagggtggaaacaaacagtctcacaatttgctagaagcataacagagcttactgacattttcaaggaaaaacaacaaagaaagaagtcatcaaacaagatggtatcttgacaaaggcacagagctccacaactgcttcatactctgcacacaataaatcctctcagagagatgaaaggagtgatgacaaatgggcttgcatttgagctgtggacactatcactggtattattcatataaccagggctctatatcacccctctggagaagaaagtgcaacacaaagtctgtgtaacaaaggaaagcaaaagtagcaataaaggtccagagaaatacacacatgcaaatacagtactgcaaactcagtaaaaggagtttttgactggagtgtgaactttcaacttgaagatacatttcgcagggacattcacccaaagcttgagagctagagcagagagacttgcttgcagtcagtaactgagtagatgaaatgcgtaatttttcactaggtgataattccctttgggaagaagtgccttatctttaattattccactttttgttatatggttcatgcttttgaactgcagttgtctgaaacttgcttgctattgaattgtgtaacaccagataatagcaggttgtcaaaagataaccccagtggataatttaagctgcttttatgagaagcctggtgctaagctgccttacacagtctttttacagtaaccataaaaaaaactgagtttatttgatcatgtattatcccttttcatataaggtcatattagaggaattcttggaagaggttttcaaactagtcctttgggcatttaaaaaatcattatataaacgtacacttcttcaatacataagaacaaacatttttcctttacaaaaaaacctcatttttaggccaaaataaattacaacttgctgaaataccttttatggctcagtgctcattccagctatataaaattatattttttgcacatcttcagaaattagagatactgagagagagtggttactttttttaggggggcggtgatggaatttcactctgtctcccaggttagagtgcagtggcgcaatatcggctcactacaacctccacccacagcgttcaaatgattctcctgcctcagcctcccaagtagctgggattacaggcacctgacaccatgcccggctaatttttgtatttttagtaaagatgtggtctcaccatattggtcaggctggtctcaaacttgacctcaggtgatccacctacctcggcctcccaaagtgctgggattacaggcgtgagccactgcacccggccagagagagagtggttacttctaaaatgacatgatgatataaccctggcttagggaacagatcaagttctaaatctcaggaataaaagatactcattatccaagccatatagtcttgtactatatacatattaacagtctatgcaatgaaaaatgaagaacagaaatttcataaaactttaaaaacacacaacataggcagggtgtggtagctcatgcctgtaatcccagcactttgggaggtcgaggcgagcagatcatctgaggttgggagtttgagaccagcctgaccaacagggagaaaccccatctctactaaaaatacaaaattagctgggtgtggtggtgcatgcctgtaatcccagccacttgggaggctgaggcagaagaatcgcttgaacccaggaggcagaggttgtggtgagccgagatcgcgccattgcactccagtctgggcaacaagaacaaaactctgtctcaaaaacaacagcaacaacaacaacaaaaaagacaaaataacacaacataaaaatgtaaagaaaacatttcatgtacaagctactccatttggcaacgtgtactaagataaaaacttatctacaaacagaatataacacaaagaaaatgtgatttaaggagtgatctcaggtccacagctcttcagttcttccaaatttgtagatcagagtggttgggtaacatatgcaccaaaaagaatccacatggaagcaataagtaccccaaacatcaacatgaaaccaacgaaaagccaaactcaaggacctgttcttcctaaacagccactttcatagctatcacctctcacctgagcattggatacagcatttatcatgaagaaagccaatgtgggaaatacaccacatgtgtgaaaggcatggttcaactgttctggcctacaatacaccactgctgcgtcattatccaccagcctgtaaaaaacaatatacctgtcacaacagacgccacaacatttcttctctcactcgtcaatacattcacattctggccattgaaaattatctaggaagactgccattttctacttcttaagcataaatttttcattaaatgctgtatccccacttcctcaaacacccacgcggacttcaggcatgtgcacaaggaagactgctgctccgcagtctggccggcatcctccagctccacctcagccttgggagcccacaatgttctatttttatttgatcccatctgcttccagcaatcactgaaaagaaacagcctttaccaaacactccaaaatgtctttgtggtgacgtcattaggaactcataactgtccccaggaattcgcagtgggaacaaaggttttcaggaatattctcagctcaccaagcttgcacattatcaatattggtgaattgacaaattgcagttttttgcaaagctgctatctcagaatcacaaacttacatctcacaatcagctggctccctccccccaagacattggtacagtcatcccacattagctgctgttttgctttccatgatttcaattaccagtggcaactgtggcccaaaaacattaaatggaatattcccaaaataaataactcggaaattttaaactgtacactgttctcactaatgtgatgaaatttcacattgttccacccaggacataaatcatccctttatacggtgtagccacacagaataacctacccctctctcagtcacttagtagtcatctcagttagcgttgttagagtatcatcgtgtttgtgttcaagtatctcctattttacttaattatggccccaaagcacaaaagtagtgaggcttgcaacttggatatctcagagaagctgtaagctagacacaatagcatgtacctgtagtctcaggtagtctggaggctgaggtgggaggaccactttttgacgctgcagtgtgctaagatcttacctgtgaataaccactgcactcagcctgggtgacatagcaaaaccccctaacaaaaaaaaaaaaaaaaaaaaaaaaaaaagagaaagcaagaaagctgtaaagcgcctcctttaagttaaaaagtgaaaggttattgatttaataagaaaaaaatacagatgaagatgctaagatttatcataaatcttctgtacaagtgtgaataaaaataatcagtactagctttgctgtcacacctcaaaacttgactgaaactatatatttatggttgggtactatccactttcaggtatccactagaggacacttggaaggcatcttgtgggttaaagggggactatggtatgggcaaaaatctatgttgtttgatttcgccatagaaaacaattgtcgcacattattttaaccagcagagtgtaatgcagtgtctgttagaagttctttactaaggtgggataaatctgtgttggtgaaaggaacgtcactgagttacgaaaacgaataacattttattaattgaaccatgagacttctgatacattttgaatgtaacagcagtaaaatatagagtaaatacttcaatgtgaatctggcctgtgaccatgctattctgattcttttgattaaattctcctctctgataactgctgtcttccacttccaagaataagactaattttacatttatctttgctatataacagctgtcattcaatggagatgatcatcatttcctctgcattatttctcccacacaatccatccctagtaacctatcacttgcctctcatgaatacccttaatattccatcaatgtcctcactggtatttcagtcagttggttgtgcaattattttctacaacccaaagtggcactctacgtgttcatggacacctggaacacaagcacaacttacatcataaacttacattattctcccagttactccatggtgtgtaactcacagaatattgaattttaaaattcagtgaccttaatcttcaggaagcatggaaatgaaggagccacactgaatgaaggaggctctctcatcttgttgattcattcccagataccacaatgaaggatatgtaaggaagatgatagacttcaaaccttaggataaacgtcatagtctagtagctattttaagaaacgccccattggccaggtgtggtggctcatgcctgtaatctcagcaacgtgtgaggccaaggtggcaaatcacttgaggccaggagcttgagatcagcctggcaaacatggtaaaacaccatctctacaaaaaaatataaaaattatctggacatggtggcatgactgtaatcccagctacttgggaggctgaggcacaaattgcttgaaaccaggatgtggaagttacagtgaggtgaactggtgccactgcactacagcatggggaacagagcaagactgtcacaaaagaaaaaaaacagaaacctcaaatttaatgtaatattttataaactgaatgagccattttcacacatgcacttgctcctttaaaatacatactgtcctgagttttaacaaatgttgtctggtagttattctgtaataatattccaggccaatcttggagaagcagatttggttatccctagtatgatttcaaagatgtgtagtctgtttaaaaaactggttgaaatttgtgccacattgattacatttccaagttttctctcaagtagggataatttggtaaaggctgaagacacactactgcttccaggtcctttcatgttcagcatacttacaggatttttctcctttatacgttcaatcaaactgcaaaggcgtggacattggttttgtctcactttaagttctgggtacatgtgcacaatttgcaaatttgttacataggaaaatgtgtgccatggtggtttgctgcatctaccaacccatcacctggtattaaggcaaaaatgcattagctatttgtcctgatgctccacttccctgcccttcccacccccatcagcaggccccagtgtgtgttgctcccctccctgggtatatgtgttctcattgttcagcttccacttttaagtgagaacatgtgctgtttgattttctgttcctgtgttagtttcctgaggataatggcttccagctccatccacatcgctgcaatggacatgatctcattcctttctatggctgcatagtatcccatggtgtatatgtaccacattttctttattcagtctatcactgataagcatttgggttgattccaggtctttgaacatttcattttttaaaaccatttatttggaaggttgtctctagtatgaatactctttccattttgatgttcgggtaaaaaccttagcatgcacattacatttctgtggttcctctcaaagatgtatattctgatgcctagtgagttccaatgcctggggaaagcctctgacacatacatttatatgatttcctttcagtataaactctcttatgacaagtagtgattgaactctagtaaaggttttgccaccctcatttcatttcatacatctatgcccttttaattacctagatttacaagttctggcttttgagtagaattcttgccacacgtattacacttctgtgatttttctccaggatgtatacatcctggaatatatatacaaattcttacacctagtgagtagtgaatactagcttaaaacttaggtatatttactgcatgtgtaaatgtattaggtcataactgcattgctacaaaaaaaaacctgaggctggctaatgtataaagaaaagagtttaattggctcatatttctgaaggcttaaatgaaaacatggtgctggcatctgatcaccctctagggaagcctcaggaaggttaaaatcatggtggaaggcaaagcgggtgtcggtatttcacatggtgagaatgagggcaagcgacagggaagtgctatgcacttctaaacagccagacctcaagagaagtcactattgccaggacagcaccaaggggatgacgctacatctttctcagtttgagaaatccacttccatgattcaatcacctcccaatgggccccacctccaatactggagattacaattccacagggatttcaagagaaggggtaaatatacaaggtatatcagtaagtaggaattattcggtgattccagaaactaggacaacgtctaaggccttgtcacattgagtttagttgtaaggctctctccagtatgtcttattcgatgtttagtgaggcctgagcgacaaataaaagatttcccacactcattacatttataaggttttttgccagaatgaattctttggtgtttgctgagggaaaacaaccgcccaaaggctttgccacattcaatacatttgtatcttttctctccagtgtggattctctggtgacttacaagatgtgaactatgcctgaataccttgccacattcatcacatttatatggtttctttcctgcatgaattatctgatgtgcagtgaggtttgagctccgtttaaaggttttgccacactcattacatttgtaaggtctgtctccagtatgaacagtctgatgaagtctaagatggacacgctgactaaaggaattcccacactgattgcatttgtaaggtttctctccggtatgaattctctgatgtctattgagtgtggagccctgattaaaggctttgccacattcatgacatttgtatggtttctctccagtatgaactcttcgatgccctacaagatgtgaatactgactgtagaccttgccgcattcattgcatttgtaaggtttctctccactatgaattctccgatgcactgtaagacgtgaacattgactgaagaccttgccacattctttgcatttgtaaggcttctctccagtatgaattctccgatgccttgcaaaagctgaacggtcactgaagaccttgccacattctttgcatttgtaaggtttctctccagtatgaattctccgatgcactgcaagacgtgaatgttgactgaagaccttgccacattcattgcatttgtaaggtttctctccagtatgaattctctgatgagctgcaagtcgtgaatgtatgctgaaaactttgccacattcattgcatttataagctttctcgccggtatgaattctccaatgcactgcaagatgtgaatgcttactgtacaccttgccacatttattgcatttgtaagttttctgtccagtatgaattctctgatgcactgcaagacttgaacgtttactgaagaccttgccacattcattgcatttgcaaggtttctctacagtgtgaattcgtcgatgcactgcaagacttgaacgtttactgaagaccttgccacattcattgcatttgtattgtttctctccactgtggattctccggtgacatacaagatttgatctatgtctgaatgccttgccacatacatcacatttatatggtttctttcctgcatggattacctgatgtacagtgaggtttgagctccgtttaaaggttttgccacactcattacatttgaagggtctctctccagtatgaactgtctgatgaagtctaagatggacacgctgactaaaggatttcccacacagattacatttgtaaggtttttcaccggtatgaattctctgatgaactgcaaggtgggaacttttactaaaggacttgccacattcattacatatgtagggtttctgtccagtgtgactcctttggtgtcttacaaaatatgaattttttctgaagatcttgccacatacatcacattgatatgatttccctcttgtatggactaccttgtgtacagttagtagtgaggcccgatgaaaggctttgccacactcattgcatttgtaaggtttctctgtagtatgtatcctctgatgattaataaggctggaagacgctttaaaggctttgccacattcattacatacatacgttttttccctaatgtgtggagaaactaaacaaccattattacctgtcttctccgtttcattacattcataaagtctcccttcagtttgaactttctgcagttcagccagacgtgactcaaagtttgatgtaagctggttttcaatatgattgttttctacatccccttgactatgttgatctcttttaccagtaagattgttttcatggggcactggcacttctttatcatttgtttcaccatctttccattgaaattcaaggtcatgtagatgtttctgtatttccctgaagtataaattttcaatatcatagctttgatgtctttccagtgccactgtttggaacctttctcctgtattactgttctctgttggtggtaattccttgatcacacatttaggagagatacctgcaaaatataatgaacatgagtttttttttaaactactactattgataaacaaacattttatattggaaacatacctacactaaacataatctttatactagacaggtgtgagagttctccaccatgatcttttatttttagaaatacaaaatgaatagaagtctatagtaaagaaagggtgactacatgtaattcaaattaagtttaggaaagcctagtttcaaacatcctatgaccaaaagacttatgttgtgcaaacatatattggcactaaaacaagtattttgcaaccaatgacaccaaattacgaaccgattggcagaaaatgtggctctctcataagagaataaaagttatatatatttacttcatatttactgtgtacaaacaaatgccaaaccacagcaagatatagtgtaatggtaaatattcacaagataaactaattaataatcatcatataaattaataaataaaacactctattaacccatgataaaaccagcaggtaagtaaaatacaatatacaatatacttagaattccatactataaatttgtatattgcatatacaagtttgcatcatatgcaaatacacaaatttatagtatggaattctaaacaaatctccctttataataagcaagaacatatattctagagacagcatatgataactagaaaatatgttgagatcactgacttttaaagataaaagaaagataaatatgtctatggccataccacctggaacacagctgatctcagaagctaaacagtgtcagatctggttactacttggatgggagaaaggtaaatacacaacataatacagaataaaaagtggggaaggaaaaatactgactatgatttcatgcctacacctatgtaacaatcaatagagcaactccctatctattgtcattttttcttgagacagagtctcactctgtcacctaggctggagtaaagtggcataatcttgcctcactgcaacctccactcctaagactcaagcgatcctcccacctcagcctctcaaatggctgagaccaaagatgttcaccaccacgcccacctaatttttttgtagttttggtagagacagagttttcctatgttgctcaggctgatctcgaactcctgaggtcaagcaacctgcctgctgcagcctcccaaagtgccgggattatatacaggcatgagtcaccacacctggtcctattcattgcctctaattacctagttaactggccacaaaatatatatcatcaagagatttctacttgaaaagcatatgaactaagataaaagacaacaaacactgtttggaagaaactacaaaatgaaaacttacagatacaatgaaggctgctttgatataaagacttaatgtctgccaaaattcctatgttgaggacccaatcctcaatgtgatagtatttggaggtgtggtctttgggaggcaattcggtcctctgccatgtcaggacacagaaagagaaagccatggtaaaccggaaaaagggcccatgccatgccaagaaccaaaatggctggttctgacatgttagacttctcaccacccagatctgtgaaaagggaatttctgttgtttcaaccacccaatctacaatatctactataggtagccatgctgactagggtaaagccaatatgctatctcattataaacataaaacaatgttgatatgctttatttaacaaagaaatctgtgagtctttactaaaaaacaatattctagactagctaacagcactaacttgtttaaaaagtcttgaggtaaattaccactatttaacacacaagcagttagtatgcccacgggattcatgtatctacatccaatttacaaagaaagtaagatatgcacctacgtttgcaggatcaaacattatgtttttttcaaaaactgcccaagcaggtactgcaggtaacaggtcaccccaaatactaagagtgtataaagaaatacttcaagagccatgctgtgttgccaaaagcattattcagccatccccatgaataacagtatctgagtcatcattccctgcacataatgatttagacagtgttctcagaaagtgatcaggccaaggcaggtggatcacaaggtcaggagttcaagaccagcccggccaagatgatgaaaccccacctctactaaaaatacaaaaattagctgggtgtgggggcaggtgtctgtaatcccagctacgtgggaggctgaggcagggaattgcttgaacccgggaggtggaggttacagtgagccgagatcacaccactgcactccagcctgagcgacaaagcaagactccatatgaaaaaaaaaaagaaaaaagaaaaaaaggaagtgatcaagtgaatgagtacggtcatcccttacagagtgagagtagtgtgggagatgaaggagttatgcaataatgggagtgtaaaacttatatgctagtaagtagccaggtattccgtctggaacaaagtactattttaggaaaggccagggaagagaaaaggcaagaggaaagggcaaggagtaatgtgcatggggcagcagggtttgtgcttgcagagctgtaggtatataatttcaccaggaacagttaaaatcctgactttggacaaaaaaagaaactaatttagaagtagcattatactggccaatatttaaatacgtgaattatactatgggcacaggacaagggaaaacagttaaaaaggaggcagtgtgaggatatgggaagaaagcagacttatgtctttataatatatgctatgaattttatcaaattgaatgtcccatgagttatatttccaggcatatgctcaacaaccctacatatcaagagatatgcgaaaaaatgttcctacaatataatcctgaagaaaaaatttgataacagccatgaagaggagatggatgaatttattttgtacacacacaaaaagacaacataaaaccttattgatagtacaacaatgttaaggagacttgggatgcagaagaagacacgctggcaaaatgggcaaatattaatctgaaaaaactaagaaagcaggaaattgttgtcaaggtttaaatacacgttcatggagacacagtatatatggaagtaatctgggatatcaaaaacataacatgggagcagacctgtaaaggagtcatttttctatgtgactgaagtcaaactgttaccagtttaaaacaggatgttataaatctaaagtgttttctgtaattgcaatggtaaccacaaagaatgtatagaagacacacacaatggaaataaaagtatgtcaagacaaaagaatcaactaaataaacacaaaggcagtaacggatatgaagaacaaaaaaatctaagagatataggaaacattcagcaaaacagcaagagtgagtccttctctatcagtaattacattaagtgtaagtggcttaaactccacaatcagaagatagagactggctgaatgaattttaaaaacaggctccaactacatactatccacaaaagattcatttttatttgaaggacacacgcaggctgaattgaaagggtgaaaaaagatatcccttataaatggtaatagaaagacatcggaggtggctaaactggtatcagtcaaaacagactttatgtcaaaactggtacaagagacaaagaagagcattatctaataattaaagggttaattcactagaagatataccaattatagttatatatgcacctaatattagagatccttaatatatgaagcaagagaaacataactaaagggagaaaagttccacagtaataataaaagacttcaacggaccacttttataaataggacagacagaaaaaaagtaagtaaataggcaacctaaactatacgttaaattggacctaacctacatatgcacaacgcatctcccaaaaacagcacgaaagaattttttcagaacttcacacagaacattcttcaaaagaaatatttaaaagtaaaactttttaacacttcttttttgttgaggctgagtctcgctctgttacccaagctggaaggcagtggcgtgatcttggttcactgcaacctccgcctcccaggttcaagcgattctcctgactcagcctcccgagtagctgggactacaggcgcacgccaccacgcccagctaatttttgtatttttagtagcgacgcggtttcgccatgttggccaggctggtctcaaactcctgacctcgtttaacacattttaaagactgaaatcataaagtgtaacttatcccttcataataaaataaaactagagatcaacagcagaaaaaaaattagaatatcaaaaaatatgtggaaacaacatattcctaaacagccaatatgtcaaattggaaatctcaagggaaatgataaaatatctcaaaacaaaggaaaatgaaaatagaacatgccaaaacttatgtatgcacagaaaacagtgctaagatagaaaactgttagatataaatgcttctgttaaaatagaagatctccaatagaacagaatagggaacccagaaatacagccacagatctccaatggaatggaataggaaacccagaaacacagccacatacctacaaccaactgatctttgacaaagtcaacaaaaacaattgagataagacattctattcaataaagggtgctggaaaaactggctagccatatatagaagaatgaaactggacccctatctctcatcatatacaaaaattaattcaagatggatatagacttaaatgtaagacctcaggctacaaaaatcctagaagaaaacttaggaaaaacacttctggataaaatataattttttaaaaaaaatttattcctcattccctaagcatgacgggaaaaaatatataggttttataaacatcagttgagaagtccttgaagtgcaagaaatgggctacatgtataataaagtaagatttgaaaataataattcagtataacatgatggacttgaaagcagacaggagaataattattataatatagcacttgttccaaaaaaaaaaaaaagtgtgatttaaagaaaatccagcaagttatatttaggaaactgaaacttactacagaaaagcaatgtgtctgatataacaagtatgaccaggccgggcgcagtggctcacgtctgtaatcccagcactttgggaggccgagactggcagatcacctgaggtcgggagttcaagatcagcctgaccaatatggagaaaccccatctctactaaaaatacaaaattagccaggtgtggtggcacatgcctgtaatcccagctactcaggaggctgaggcaggagaatcgcttgaacctgggagacggaggttgcagtgaggtgagatcgcgccattattctccagcctgggcaacaagaatgaaaatccgtctcaaaaaacagaacaaaacaaacaaacaaaaacaaagtatgaccaatctctttcatggtatttctacaatgaagatagtaactatattaaaaaaatatattcaaggtattaaaaaatttccaatgagaagaactgtaatcaattccattaacaattttttttttttttttgagatggagtctcgctctgtcaccaggctggagtgcagtggcgcaatctctgctcactgcaagctccgcctcccgggttcatgccattctcctgcctctgcctcctgagtagctgggactacaggcgcccaccgccacaccctgctaattttttgtatttttagtagagacgggttttcaccgtgttagccaggatggtctcgatctcctgacctcgtgatccacccgcctcggcctcccaaagtgctgggattataggcgtgagccaccgtgcccggtctcattaacaaatttaatagtaggaattaagtcaggagaaatgggagtaaaagaaataactgaaactgtcttattacaacactattgagtttgtgtaagttttagagaaactgctcctgagctataccatctgtactaaagaaagaaatcttgtaaaatatataaaatgatatacattccccaatacaacactacctcaaaaagaaacataaaacaaagaaaactgagtatcctcaaaaatatggaactgattattaaataaataaaaacaaagttcatttacaatacatgaaaatgcaccagattaaagtagcggtcacttaaaacaaattatgtggacttaaaaaatataagctttggccgggcgtggtggctcacacctgtaatcccagcactttgggaggctgaggcgggtggatcacagggtcagggataggccaagcgtactggctcaagcctataatatcagcactctggggtgccaagaccagagaattccttgagcccatgagttcaagagcagcctgagtgacatagtaaaaccctgtctctacacgggcatggtggcacgcacgcataattccagctacttgggaggctgagggtggaggattgcttgagcccaggagacagagattgcagtgagctgtgatcacaccactgcactccagcctgggcaacagagcaagaacctgttttaaacaaacaaaaaagcacatggacagaaaacagggaattggatattttaactctgccataaagttctctgcgaacttcagctctggaaccaccactgatgtacaaagaaggcagcagaatatatatacaaaggtgacagtgaaaggccagatgcagcattgtgaagctttttatttttgaaccaataaggcttcagtctcaaataacggaggggttcccaagaaagacaacagaggaaatacaaaaatgcacaagggcgaatctgaacttctagaaggaaattatactcacctaggaagaccaggttcctatagttctccaacatcacatccttgtacaaagctttctgcacaggctccaggcatttccactcctcctgagagaattctatggctacatccttgaatgtcaaatgcccctgaaatgaaaaacacatttcaaaaagaagcaatatgagagctcttctgtttacacaaaatgaggagagaactatcacatcactttgaagtgtgtgttttgacatatctatatggcatctgtgagaaagttattggtccctaattttagtttgttataaaatacaataggagactattatattctctacatcagtgtatagttctatttttgtggacaatacaagaaatacacaaataagaaaaacacatggttatcccttaaaaagtgttagatattatgctccatacatcaactgtgtctaggtgagctagtatatgagtggtgttttcagagatgacaatgtctacagcggctttaaaggtcagaaactaaaaactgtgatgaccagagcaacagcaatgactgaagttttggaacactccccacgtgctgggcattattccaaatgctttacatgttctaattcaaataacaacatgatagcctatgagagagagacttgttccatgttactgtgtcacagacacgctaacaaacttgcctaggtcaacaacctgaaaatggcagagcaagcatctgaacccagatgtctgagaattagagttgaatcaaaacaatcaaacagttacattatggttacagaatatcctagtctgtctgtgctgctataaccaaataagacagactgggtaatttatgaacaataaaaatatatttctcataattctgcaggctgggaaatccaagatcaaggtgccagaaggactgatgtctgctgagggatgatccctgcttccaagatggtgtcttgttgcattttctggaggggaggaatgctgtgtccccacgtggcagaaggaacagaagggccaaaaagcagtgaactccgtaggataagcgttttgatatctcactgaccagaacaccatatcccattgataagggcagacccctcaggatccaatcacctactaaaacccaaacctcataatacttggagattgggcattggagattaagtttcaaatgaattgtggaggagagaaaaacactcagaccacagcattccatcttgccccaccaaaattcatgtactcctcacatataaaatgcattccatcccaatggccccccaaagtcttaactttttctactaccaattcaaaagtctatagtctacagctgcatctaactataatctaaatcagatatgggtgagactcaaaaatgtgtttcatcctgaggcaaactgctctccagctgtgaacgtgtgaaatcaaacgacttaagtgcttccaacatccaacggtggcgtagacacaggctaaatatttcaactccaaaatgcagaaacaggaaagaagaggtagccactcccatgttaagtctgaaactcaaatagggcacacatattaaatcttaaggcttgacaataatcttctttgactctatgtcccaccttctagacatcctggagtaggagttaggtccccagtgtcctggggatccctgccccattagttttgttgggatcacccacatggaacttctcacaggctgtggtttcccgagctgggatcacatactggtgactctacagttctggggtctcaggcgtggtcctgcttccagggctccccttgaccttgccctaataagcactctctaaggtgtccctgcctccatggctaggctgagaattgccttagtggtgacctcctgtggtagcactgaaaggaacaggatgaaaggttaggggccactgagcaaaaagataactgacgtaaaccggtgtctgcaataacacagaaagacatgagggtgaagatctagtaccacagatatctgcagtaccagagtctatccacaatagtacagaaaataggggagcttctgagtagaaagcagcaaacctcttcaatagggagatgacaagcaaaggcccagagaaaaagcatgggaagtctccagaatctagggtagttgattggaatgtcctccctgaacaaagcagccaccaaatctgggcaggcagctgattttttcaaatgctgaagtcacaaaagaagacaataaaacatacaaagaaacagggaaatacggtctacaaaaagaaaccaactgaatctgtacaaacctacatgaaagaaatggcaatttacatcttggctttgaagaattaaaaagaaatgtgggccgggcatgattgctcacaactgtaatcccaggactttcagaacgccaggcaggaagatcacttcagagcaggaattcgagaccagcctggccaacattatgaaaccccatctctactaaaaatacaaaaattagccaggcatggtggcacatgcctgtaatctgaggctgaggcatgagaattgcttgaacaggaggcagaggttgcagtgagctgagatcccacccctgcactccagcctcggcaatagagtgtgactctgtctccaaaaataaagaaaatgcgaaggtaggcagatcacctgaggtcaggagtttaagaccagcctggccaacacggtgaaaccccgtctctactaaaaatacaaaaattagccaggtgtggtggcacgtgcctgtagtcccagctactcagggagactgaggcaggacaattgcccgaacccaggaggcagaggttgcagtgagtcgagatcatgccactgcactccagcctgggcgacagagcgagactccatctcaaaaaataaataataaataattaaataaaataaagaaaatgaagagagtctaatgggcccatgaaaaaccatcaagcaccaagaacatatgcattctgggagtccaacaaataatgtgaatatatctaacattactgaactttacataagcaaacaagctttaatgaaagacataataaagatattatcaaagactgacaaactcgattctttttggaagacatggtgacataaaggcctgcaactgaaaaaattcagagccatgaaaacacaaacaaaatatgtgggaattttttttttttttagaagacagagtctcactgtcacccaggcaggagtgcagtggcacgatctcagctcactgcaacctccacctcccaagttcaagggattctcctgcctcggcctcccaggtagctaagattaaagacgtgcaccatcatgtccggctaatatttgtattttcagtagagacagggtttcaccatgttggccaggctggtcttgaactcctgacctcaggtgatccacccaccttggcctcccaaagtgcctggattacaggtgtgagccaccacacccggccaatatgtggaatttaaataatatgtggctgtgttgtgtaaaaggagaaccataataattttggaaagaaaatggaggggtttgccaatctacttgtgaacctattatgttatttataatctaaaactttataatcaaatataatctacaacaagatatacagaaaaattcaaattaaagattcaagcaaataaaatgtaagcaacaaaatattagatcttaaaaaaacacagtattttataatcacacagcgagccaggccttccaaagaaagatcagttatttatttttgcttttgtggtatagcgtcctaacagaagcaaccactctttaaactgtccaacctgaaggaaccctcaaacacctgtggtgaagagagcattgtggcagccatggtgaaaaattataaaagatccatatgtcttcatttagagattgttccaaagaggatgcaaaacaagctattactgcttattaacaaaaaaagatgtatctttgaaaaactggcacaatgaaatttcacaacagaacatgtactgaagaattgttttctaaaatctcataatgacacgtaaatgcatcttgacacctctcactgactcttgccacagaacttacaactgtagctccccacggaaacatgagggatgatggagaaagtgacagggaaaagaaacccgggttcctccaggttgggtaactgaaagagtgattgcctctttaggatggtgcatttcctattttcctggatctggcaagatttcccactaccctaaggtgcaatggtgtcctcatacaccaacgacacatattgggtggatttcccacccaataaaaaaaaaaaaaaaaaacttactactatgttctgtttacattttgaggctatggggaaaatgaaaacccttcgtatttccattttccaattccttggactgtgaggaggtttcattattttgtggaaatcaaaccaaaataattttcattctttgctcagttttcctttactgcattctaggagccatttcatattctgtagttaaatttttaaaatatatatgccttgatgtccttttcttaggttataaatttctttctgtgtaaaactaaagctgggcacggtggctcatgcctgtaatcccagcattttgggaggccaaagcgggtggatcacctgaggccggaagtttgagaccagcctgaccaacatagagaaactctgtctctactaaaaatacaaaattagccaggcacggtggtgcatgcctgtggtcccagctactcaagaggcttaggcagaagaatcgcttgaacctgggaggcggaggctgcagtgagccaagattgcgccattgcactccagcctgggcaacaagacgaaactccgtctcaaaaaaaaaaaaaaaagctaaaatgtttccttgatgcccatttttgtttgctgataaattacattgtgtatatttaaggtatacaacatggtattatggtatggatagtaaaaaaaaaagtcattagagtttaacaaattaacacacccatcatctcacagttactttttttttttttccctctgttttggccagaacagctaaaatctcatttagcatgaatttcatatataataaaacattatttacaggctgggtgtggtggttcacactgtaatcccagcactttgggaggctgaggcaggcggatcatctgagatcaggagttcgagaccagcctggccaacatgatgaaaccccccaccatctccactaaaaatacaaaaatgagccaggcgtggtggtgcacgcctgtaatcccagctattgggaggctgaggcaagagaaaatcggttgaacccgggagacagaggttgcagtgagtcgagatcacgccattgtagtccggcctgggtgacaagagcgagactccgtacaaaacaaaaagcaaaaaacaaaacaaaattatttcctatcatcctcgtgttgtattaacttcttaatgcctaaactgcatctctgcttgaaattttaccaaaaaaacaaatatatacatcatgtgatgtttaaaataaatataatatttaataataattggtgcagtgagagaatttggctccatcttctctgataacaaatgttcagctcttacatctgagcaaaattataaccttaaaacttaaaacaactgctggtaagagtccccgcaggaacaccgcagtctctgtgagatggatattctgaccatggctagaatctgacattcaggttgatttcatatttttaaatcaatgatggaataaaacacgctctaatgtctgtatctagttttccattcaattccctgtcattaaggcagttagaaatagtgactcattcatacagcttcaaatgtagtataaaatcaggcagaaagatctccccttacacgcctccttttccatattttttttttttttgaggatgaagtcttgctctgtcacccaggctggggtgcagtggcaccatcttggctcactgcaacctccacctccgggttcaagctattctcccgcctcagcctcctgagtagctgggattacaggcccctgccaccatgactggctaatttttgtattttcagtaaagacgaggtttcaccatgttggctcaaactcctgagctcaagtgatccgcccacctcagcctcctaaagtgctgagattacaggcatgagacacggcgcctggcccctttcgataatttactaggtatttatgcacattaatatgtgacttccacatgcagcttctctattcctggtctacagaaagctgacagtgcatccagatgtggcccctaaacaatccctgctgcccaacagctctgataccacgggaccctcaccccatctccatccatgtctgggtgtgagcccttcccaggaccatgcccagtgcagcctcttcccaagttcatgtcactggatcatggtgagatggaatctaaataagatgagaggaactgaggaaaagcatggatgagcatgagcaaatgtgtcaggaaggacacttcagactcagagaagatttgcaactccgacgccctgtacttcacaaaggaaggagacagaatgacccaccaagaatatcacttcacttgagtaaagtatcactctacctgagtagccatcactgactccttttccttcctcttcttcctcttctgggtttctttctcagtcaatgtaattattcacacatcaaacctgaaagttaaaaaatctgttgtttaatgcttggaaacaacacattcctttctgtgtcacaaccatgcacacagggaagaactcagcctgtggagagacagcccactgcaccaggggggatgcaagaataataaattcctacacaaagaccaagtgaatctttcaccgttttcttcagcattagctcccctctgggagaagcccacacacaggctgcagcagtgtgtagctaggctggactgagctcccattcagggcacggacctatccctgatcaaaccccatgcagcgcacagccccccgtcacctctgtgggtcacaggctgagctctgccctcggaaatgggggacacagaggctggaagctcaatgctggatacaaatgagaatcaacttggggctgggagcggtggctcatgcctgtaatcccagcactttgggaggtcgaggcgggtggatacctgaggtcaggaattcgagaccagcctggccaacatggtgaaacaccctctctaccaaaaacacaaaaattagccaggcatggtggcacaccccttaaatcccagttacttgggaggctgaggcaggagaatcacttgaacctgggaggcggaggttgcagtgagccaagatcaagccactgcactccagcctgggcgacagagactctgtcaccaaaaaaaaaaaaaaaaaaaaaaaaaatcaacttgggtacctaaaacattacggaggctgggccccaccctaactactggaaggagaatctctataagggggaatgaaccatgtgttacaaatgccttggcactctagtgtgaagcgagggttgagtagtctcaaagggggcaagactaccacagccccagtctcccagctctgacctccccttggggccttgctgtcaccagtctgtagaaagtggaaggcaaagggccagaaagaaacacacagagcagaaaatatggacctgcctttattggcttttatttgcaatcctagaatcagacaacacctcattcttaaaatgaaaggagtgttctgtgagctaaggggaggaggttggcttcataagctgaaaggggctgaatggagcaaaatcaggaaactaaaagcatgttggttgtttcaaagttacttttctttgggttgccattttccccagatcctcaaaatgtaaaaacaacatagtagtaagttttgtttaaatgagtgggaagtctcatgtgatgctggtgggagagggcacctttgcagctcgggatgggggaaatcttgccagattacctgcaactgaggggccagagagttctaggcacagggacagcccaggtagacaccctcggctccaggaataggaaagaggcctgtgtggctggagcagagggagtgaggaggacacaggtaggaaatgaggtcagagaggtcccgaggcagcagatcaggtagggacgaggtcttcaaacatttttctcccacagctcacagcacttttagaaactatgcatttccctaccattttaggtaaatgtaacttttctttatcatttgaattaaaacccttctatataatgtcatatcttctctatttcaaatatatcctgacatgtaaagctagagccaggaagtatagggccaccgtcatctgagatgtgcaggagcgcaggggaatgtacttagggagtttaggaagtcactttagacacataaaggtggagacgtctcttagacggctgaacagacaacagaggagacaacaggacacagaattctagagttcaggggacaggcctgcaggggacatggagacgtgtaggtgagtaggtgggtgatatggatcagctctgtgtccctggcccaaatctcacactgaattgtaatccccaccgttactggtggggcctggtgggaggtggatggatcatgggggtggatttgtgatgaatggtttcgcaccaccccttggtgctgttctttatcacagtgagttctcacgacatctggttgtttagaagtgtgtagcgcctcccccctcactctctcttgctcctgctcccgccacgtgagacgcctgttcctacttcgcctgctaccatgtttggaatcttcctacaggctccccagaagcagatgttgccatgcttcctgtgcagcctgcagaactgtgagccaattaaacctgttttctttataaattactcggtctctggaattttgttgtagcaattccagaatggactaatacagtggggtttaaagccatgagatgagatgatgaggaaagacagtaggtgtggacagagataagaagaggttcaaggactaagccatgagtctttcccacattgagaaacattcgaagtccggacacagcagcagaggaaaatggtcagggaggtgacaagaaaattaaacagaaagctcctgacaggaaaagaaagactaaagcaggaaaagaaatacattggatttagaaatggggaggtcactggtgactctgaaaaataaagttatcagtggaatggtggatatgcaagtttgactggatgcattcaagagggaatgggaggcaagaagtgaagacggagagtataaataagatttcagcacagaagaggggtactcatacgggcagaaatgtagttagtagtatgttttgtttcaattagggcagagtggaaggaaacgataagctttagggtctgtgtgtgtgcatgcatttaatgggcaataccaccatcagtaaacaatgtttaaaataattccctagaggtaaaaatagacgttgcagttgttacactttataataggccaattttttttctctttttaacttatattttaagttcaggggtacacgtgcaggaggtgcagcctggttcacaggtaaacgggtcatgggggtttgttgtatacattatttcatcacctgggtttttgtgtgtgtgtgtgagacagagtctcgctctgtcgcctaggctggagtgcaatggcacgatctcggctcactgcaacctccgcctcccgggttcaagcaattctcctgcctcagcctcctgctgggactacaggcatgtgccaccacacctggctcattttgtatttttagaagagccggggtttcactgtattggtcaggctggttgcgaactccagacctcaggtgatccgcccgcctcggcctctcaaagtgctaggattacaggtgtgagccaccacgtctggccccatcacccgggtattaagcctaatgtctattagttatttttcctgatcctctccctcctcccaccctccaccctgaggtaggccccagtgtgtgttgttgccctctacgtatccatgttttctcatcatttacctcccacttatgagtgagaatacgcagtatttggttttctgtccctgtgttagtttgccaaggataatcgcctccagctccacccatgtcctggccaagcgcattattttgttcatttttatggaaaggccgttgttttgtacgagcctcccgcactaccagaccaagccagaatgaagtctctcatgctaaacgccacattagcaaactgacccttgaaataagtcacgtttaggaaaaaagaaaattccaaaaaagaaaacaagaacaggagttaaaaaatgaatttgtaataatttccctccttatcacgacatcgtaacaaggtttgagggaagcacatctcacatgagtgtgaaaacccaatcatcacatttattaactacaaaaggatcgaatttgttgtgattttgtccttcaacaataagaaactggtaaatgtgtttctctaagttcggtgagccatcctagcaaattaatcaaacctttggctggggtagtaggaatgccaatttggagtcagtaggtcagaagtataggtgacaacctactactttcgaaatggtagctgaagtgagccggggaggtcttgtgagactgagccctttacctgtgggcaacctgtgggagatgactctaactccaggtagacagtgccagaattaaattgaattctaaggcaatctagctgttgtctgctggagaattttttagtgtgtaggagaaaactccccaacactggccacagaagagttctgtgttaagtgtgagagtagaaaggaaaaaatttgttttttcctttacaccctgcaattactaggcctgtcattctccaaagagcattacccatcctctccccaaactgcctccccagcacctagtggaccctcttgcctggagaaaatatccctgttccacactgagtttaaagcattttgcctcgtagctccctgtgattgttgcagcagacagaggtggggggaaagtaatcaccactgtcctggcagcgagaaagtaacagctgtatcttccgaggacagtcccagttgaaatctttgtgctgcaggtcgttgtgatatcatattctctgattctttgaaaaatcttccctaagccaccatcctgccatagacccaccacagaaaaccctccctaacgaaagccttttgtcactagagtttgaggccctaacgttcccctcctaaactgagacaggtttacaaacttccttggggtccacacccttcccagatactccatagtgctccccatatcgtgctacgaaatcccacatgccccaacaactcataaactcctgctgacctaatacacacaaagatacctgaggactcaatgacccaagacactcgattccattcataatgaccccacccttgaacactggcaccaccatctactaaaacagatgtctccaatgatgcacataccccagtgagacccaacatcttccaaggaaactctccatattgacatttagatagtccaaaatgcatctataaccatcttaacttgccgcccaaaatactccaaaataacaaatgtagcccccaaagtgatggaccccacagaagtcactatggagagtgcctgctgtgctgcagctctgggttccatgccctcaggaccaatgcaccaccactccagctgcccactctccccgtgggctcagcttaggacttgctcctcaattcagctgacccttgaacaatacagctttggattgtgtggctcctttcaataaaattttcctcaataaacatcctgaagaatattttggagatttgcagtattttgttggctgtacaacaagaaggcctggacaatgagaagttgttccttaagtcaggaagggaatgccttttaaagttctttgatgttgggccgggcacagtggctcatgcctgtaatcctagcatgttgagaggccgaggcaggcagatctcttgaggccaggagttcaagatcagcctggccaacacagtgaaaccccatctctactaaaaacacaaaaaattagctgggcatggtgggacatgcctgtaatctcagctacttgtgaggctgaggcatgagactcgctagaacccaggaggcagatgttgtagtgagccgagatggcgcccctgcactccagtctaggcagcagagtaagactttgtctcaaaaaaaaaaaaagcgggggggggacagggggcaaaggacctgaacattttgcaaataagacatacaaatgccaggcacggtggctcacgcttgtaatcctagcactttgggaagccgaggcgggcagatcacctgtggtcaggagttcaagaccagcctgaccaacatggtgaaacccccgtctctactaaaatacaaaaattagccaggcatagtggcaggtgcctgtaatctcaggtgcttcggaggatgaggtcgcagtgagctgagatcacgccattgcactccagcctgggcaacaagagtgagactctgtctcaaaaaaaaacatacaaatgaccaacaggtatatgaaaaggtactcaagatcgctaatcatcagggatatacaaatcaaaaccaccataagctgtcacctcatacctcttaggaaggctattatcaaataggcaagagaggtgttagcaatgatatggagaaaaatgagcccttgtacactgctgctgggagtgcacatcagtacagccattatgaaaaacactatggatgttcttcaaaatattcaaaatagaacaacaatgcaatccagcaatctcatttctgggtataaatccaaaggcaatccaatcagtatgtttaagagacatctaggccaggtgtggtagttcatgcctataatcccagcactctgagaagctgagatgggaagatcgcttgagaccaggagttagagaccagcttggacaaaacagcgggaccatgtctctacttaaaaaaacaaaaaacaaaaaacttaggaacttctgccccctcatgatcactgcagtattattcacaacggccaagatatagaaacaaccaaagtgcccatccaggaatgaatatgtaaagaaaatgtgtgtgtatatatatttatgtatgtgtatatatatatatatatatatacagagtgtgtgtgtgtatatttatataatggaatattattcaaccataaaaaagaaaatcctgccgggcacagtggctcacgcctgtaatcccagcactttgggaggccgaggcgggtggatcatgaggtcaggagattgagaccatcctggctaacacagtgaaaccccgtctgtactaaaaaaaaaatacaaaaaattagccgggcgtggtggcgggtgcctatagtcccagctactcaagaggctgaggcaggagaatggtgtgaacccgggaggcggagcttgcagtgagccgagatcacaccactgcactctagcctgggcgacagagcgagcgagactctgtctcaaaaataaaaaataaaaataaaaataaataaaatcctgctatttccaacaacatggatgaatctggaggacattatgctgggcgatataagactgacacacaaagacaactactgtatgttctcacaagtagaatctaaaaaagtccaattcatagtaataaggcggaacagttgttaccacaggatgctgggtggggaaagtggagaaatgttggtcaaagggtacaaattctcagttataaaatgaagaagttctgaggaatctaatgtacttcgtggtgagtttaccgcactggacgctttaacagtttggaaagtttttgaaaaatctaataaattatggggtaaaagttaaaaaaaggcaatattgagaaattaatgacatcagctgattacaggatgacatcaaatcttatttcagaagttagtaattatagaagaaactgaataaactaaaatttaaatcaagcttccaaaataacaatgaattaactgtaaagcaactacaaggaaaaaagtaaatccattaacaaaacaaaaaaccaacactctcaactctccttcaaagacatacattgtaggcctgtagaggtggttcacacatgtaatcccagcaccttcaggggctgaggaggatggagtgcagctgagaggctgcagtgagccgatataattttaccgcactccagcctgggcgacagagaccctgtctcaaaaagagaaaaaacaaacaaaaaaccaaagatacatcttgtagtgacagtcagtcatttcttgcctatttctctcctcctccatcctctactccctccctggaaagaagagttacaaaatgactgaatcaagtcactgccctgtggctaaatagggattccaaatatcttttgatataaacaaatacaaaatgcacaagccttgtagaaaagagtggtaattttcatcctcatgagtacaatttaaagaaacaaattttaaattagagtataaagtcacaaatcaatacattaaaaccaccatccatatccaatcaactcacagctcatctgggtggggtcctcgcccactctcttcactactatgtgtttcccgctctcattctgcacgtcttttttccctttgctgtttttctcccctttctttattccctcttttatgtctattctgcccaatgcttcgaaatttatttcacctcttgttgctctttctccccaaactttcccattgtccccagccgccacgtattcctgcctcttttcccccatctgagctccctgtctgctctccctgttaaaatccctcttccctgttaaattcccttttccctgttacatctcctttgttcccactctctagcacccccaacttcctaggcttcctccttgctgtggttctccctctactctcctttgttacccactcccctctccttcagtcccagcaccacgtggctctgtcagccgcggctccgactcttaccttttccgccccccgcgtctgactgcagtgcctcctcctttgccgcccctctctattttgctgcccttcagctccctgaagctctcccttttccctaatttctttatgtgcttttctccccgtgctactttctccatgcgtcctcttgcactcttgctctctttgccagtacctaaattatcatccattttgccgtgtactcattcttttctccccagtttttctttctgtcccgtcgctccccctcttttcctctcctgatccctctcacccacacattcaggaggaaaggggaggaatacgatgcccacctcccggaagagcacattttccagtggagtaaaaatttgggaaggaacgacagtgggtgtcacaagacagactcgggtgacctcctgcaacgcggagtcaggaaaagcagtggctgtgaaggggcagcctggggaggggaaggacccggcgtgaggaggacactaggtggcgcgcggaggacactaggtggcgcgggggacggtgtctcaggacagggagggtctgcagaatcccaggacctgggagaagaagcggctccttcaggagctgggcagcgggcgctcccctccaggcgtcgacaagggcgaagctcgggggtctcgactggtgggaatccacctcgcgagggaggacttgacttcgcccggggccgaagcaggggtcaatgagagttttaagcaggaacacgacctgaatggggttatcgacatggttatctacatggcagaaaggcagggggcaaggaacagcctgagagagattttaaaccgacagggaagcaattctcggacttacgtggggagaagtgcctgttgcaggggcgaaggggctatgggtattttaaggtccgtagcgatccccagatcactggtacggagaagtgaggactgcaaagtgcacgtttaatccaggcagacggagcgaagtaatgtttaatccacgtagactgaaacacacacacagcgataaggcctttccctggcgcaatctgcttccgggagtgacggaaactgctagcggagagaaaaaactgggaggccagggggcggggcctgggcgagccgcgaccagcaaggggcgggtcggaaagaggggcctgactcggggagggaccctgagagggtggagccgggccggagcggcagtgggcgtggctaggtggggcgggacggagccgcggcggaggatggggcggggtttcatggggtaagcggggccgaaatagagcctgttatttactctggttcacaggcagcatgtctttggttttctgactacttcttgtcctgtgaagcagcgttgctgcctgcctattttaagttaatgtttcaaaatttaaggttaaagcttaaagttgtggtccacttatattagaaactaagatgatttcttaacaagttgaactaagtcaaaaccgatttttacaagcttggtggactccatccactcttgccgatgatgctgaagctactcaatagtcagggaactaggatctcgctggggatttgatgtggagccgtggctggatccaggaacccggaagacattatgccaagcgaaatatgctagacacagaaagacaaatactgcctgtgcttttacacgtgcaaagtacaaacgtcaaatttacagtaacagattagaagggtggttaccagggctgggggatgtatcctatgcctttatcaccattatattttggaagcagataacttctctggcctcacagattcacagctgggcagaaattttgcctcaggatgaatcacaccttgattctcacccatgtgtggttcagataatatttagggggtattctgccctaagagctgatacaggaatggattaagacttttgagagttgatactgaaatggattaagtcttttgagatgggccagcagttttggaggcccaggtgggcaggtcacttgagctcaagagttcaaaaccagcctggacagcatcgtgagacccccatctctacaagaaatacaaaaagtagccaggcttggtaatgcactcttgtagtcccagctacttgggaagctgaggtgtcagaattgcttgaggccagggatttgagatcatcctgggcaacatagccagacctctctacaaaaaattaaattatctggacatggtggcctgcacgtgtgggcccagcaactcggaagggtaaggaaggaggatcatttgagcccaggaggtgaaggctgcagtgagccatgagaagaggagatttggttgggtgcagtggctaacgcctataatccccacactttgggaggccaaggtagcagggagctaacttgcattcttctgttagctgaggcgtttgatgataaatgaaagcagaaagtttgtgacttatttacgttctttccacagaaaggccatatgtccttggccataaagaaaaagagacctacagcttatctgcttcctctatttttttttatatgttctggaccatgaagaaagatttatagcttatttgctttatctctttgctttctcctggtcctttcaggctgactccttttccccaattagggctccacagactctaccctcaaagggcatttttttctcaccctcctataaaatccctcccacaaataaaccaggatcctatttcccagcatgaaaagtttgttggaaaaaaaactgaggctgcatgggaccttctttctcttcttcaaaactacttcacctcttctctcttttgtctctctcttcctaactgccctgcacaattctaggtccccagtgaatccttgggttgacatgcaagggaagaacccatagggaaaggaaatctctggctttcagagataactttttggatatctggatgcattcataaccatccttgtgttaccagaaaggggtcctgatccagaacctgaaacttccattgcacaattataactgagaaaattattacagtgaaagagatctgacctaatcaactccatcttgcttttaacctccaagctgctcttgttcattcctgggcataggctgaactaactttggaaggaacttagtttatagtttgaaacaaagacattaacagccctttcccaaaacaaacccccttcctgcttggggactagactgcctttgtaagactaacaaattaggcacaaggtgagagatgatggtttaggagtcatgtagctggaggctacaagattctcacccttcccagattgttcctggggataacattactattataaaacctaagatcagtgcttgagatattttgcattccctgcacttgatggatcacctgacaccaacccagatccataaactggctcatctggtcttgtgaccccacccaggaactgactcagtgcaaaatgacagcttcagatctctatgatttcgtctcctacccaaccaatcagcactcccgactcactgacacctacctatcaaattatccttaaaaaccctgatccccgagttttcagggagactcatgtgagtaataaaaaaatttcaggttcctgtacagccagctccacatgaattaaactctctcttgcaattcccctgtcttgatgaatcagctctgtctaggcagcagggaaggagaacctgttgggcagttacaaccaaaagggagggttcttggatctcatgcaagaaagaattaggggtgagttcacactgtaaagtgaaagcaagtttactaagcaagtaaaggaacaaggcagggtgcagtggctcacgcctgtaatcccagcacattgagagaggctgaggtgggcagattgcttgaacccaggagttcaagagcaacctgggcaacattacaaaactctatctctacaaaaaatacaaaaattagccaagggtaatggtgtgcaccagtagtccaagctagttggaaggctgaggttggaaattgcttgagcctgggagaatttttttttttgaggcagtgtctggctccggtcacccaagcagtagtgcagtaatgccatctcggctcagactctaattcaacacggaatgttgagcttctgagcgtgatatagcggaagtgccttctcttccggtctctctggtcttggccgcagaagccagatgacgaagggaacgtcattgtttggaaagcgtcgcaataagacgcacacgttgtgttgccgccgtggctctaaggcctaccaccttcagaagtcgacctgtggcaaatgtggctacgctgccaagcgcaagagaaagtataactggagtgccaaggctaaaagacaaaataccaccggaactggtggaatgaggcacctaaaaattgtataccacagattcaggcatggattctatgaaggaacaatacttaaacccaagagggcagctgttgcagcatccagttcatcttaagaatgtctatgattagtcatgcaataaatgttctggttttaaaaaatacaaaaaaaaatactgaatgtttactcctgaaacttatgatgcctaggttgagaaagactcaattttcctcatgctaaatactttatacatgtcctttattcatgcatacataggacactttacacaatataattgttgaaagtgcttctgaaatactgttcaaattgtctataatatttttacacatgcactataaaaattaaatttatcagacaataaatattaaataatttaataaaattgcatttttcaaaggctctaacaatgcatatttgagttatcatattaaacattgtattctatgatttttcaactgtaatataattttttttgagatgggatcttgctctcttgcccaggctgcagtgtggtggtgcaatcacggctcatgcagcctccacctccccaggctcaagtgatcctctcacctcagtttttgtgtttttagtagagatggggttttataatgttgcctaggccggtctcaaacttctgggctcaatctgtccacctcagcctcccaaagtgctaggaatacaggcatgagccacagagcccagccaaaactacattttaaaaataattttttatcattacacactccactagaaaccatttaacccaatttatggacttacatttcttccattgaagaacttgaaggatccaaaaatcgaggtgacattctcagatttgtgtggcaaaaaaagaatagaaaaataacagatgcaaagaatgtgttccaccaatatgtggaggatcccttttattttaagttcagggaaagcattggaatgatacaagaaaataaactgaaattgtataatgtggaaacaagagctctgttgctaatatgcaagtttatcactgagattttaacaacacaacatgctaattataccttaaaatatgtttctcccagtctgggcaacatggcgaaaccccatctctacaaaaaaatccaaaaattagctaggtatgctggtgtgcacctgtagtcccagctacttgggaggctgagagaagaggatcacctgagtccaggaggtggaggttgcagtgagctgagatcgcaccactgcactccagcctgggtgactgagcgagaccctgtctcgaaatattacaatatgtgacagcgcagcttccatcagaaataatttgttcctcttttgcccacacaaaatattcacctccacttcctctaacatttttttttaaaaaaaaaagcccaaacataactttcagttgcaagcaaggatctcatgacagtctcatgacacttctgttcactgagagcccaatagagtcctcgtcactcacgacatttcatggtggaacagaaaaataaaacctgaattaaccctcacattcagaaaagggaaacaaagaaggtactacccagtaggtccatagcaaatgtgcaattttgctgagaagatgagttagggcctggttccaggaggtcaggaatgaataacagtacttttcatggctacagttctcctgagaataggtttccagtccactatattttgtcgttcttaacttcacccgatgacatccctcatgcagtatcagaaagtatgccctccttctgcagtaagcatctttccccagctacttcttttccacttcaatgtaccatcccaaagactattataagtctaaatttaattttgtttttataaaatactatggactgatagaagtctcaaaagtataacattatgaaaagtataacaaaagatagcattttatctgatgccatttcaaaatagagacattttcaaagctaaacccatgactttagctatacccacgagttttaggaacccttccttagtttcagaattttattccagtgcttttgaacttcttgggccacagtctagtttctatttactacacttgccatttcatccactctcaaaaaacaatttcacaagagttaccttaatcaactggcaggttatttcaaagaacgttagggctatggccttgacttggactttgttataattttaacttgctgttgcccctcaaaccacttctcaaatgtgagttttatcagttgcagatgagctactgctgcagacttaaacattgcttgaaaatcagctaactcatttttgaagaatttacaaaatattgtgtcaagtgcagttgaaagccatatggcacattagcaccttctgctttctttttgtttgttttgttttgttttgagatgaagtctcactctgtcacccaggctggagtgcagtggcatgatctcagctcactgcaacctccacctcttggtttcaagcaattctctgcctcagcttcctgaatagctgggattgcaggtgcctgccaccacgcctggctaatttttttgtatttttagtagagacagggtttcaccatcttggccaggttggtattgaactcctgacctcgtgattcacccacctcagactcccaaagtgctgggattacaggcgtgagccaccacacccggcccaagcaccttctgctttcttgatctctatactggcaggtggtatttccaagaatgatgccccctctccaggaaacgtttgcacatgtctggagacatttttgattgtcacaattggtggtgttgctggtatctggtggtaaggaacagtgatatgtgtttcctccaaatctcatgttgaaatatgacccaaattgttgaaggtgggccgagtgaaaggtgcttgggtaatggggttgggtctcttctgaatggcttggtgctttctccatgataatgagtgagttcttagtcttagtacactcaagacctacctgtttaaaaaagactagtggcctggctggtggctgaagcccgtaatcccagcacactgggaggctgaggcaggtggatcacaagatcaggagttcaagaccagcctggccaagatggtgaactctgtctctattaaaaatacaaaaagtagccgggcatggtggcgggcacctgtaatcccagctactcaggaggctgagacagagaattgcttgaacctaggaggccgaggttgcagtgaactgacattgtgccactgcactccagcctgggcaacagagagagactctgtctcaaaaaaaaaaaaaagaatccttcttctagtacacagatgcattttaaaggggtcttctctactgctttttctctcaaaatcaatttcagtttggcctgtctgttcacatttacatgaggatccaaattgttgttttcataggtaaatgagtgactgagtatcctcagcttcgaacagaaagagcattttgctccttgcagctgataggcacccctaggtgaccgggggcctcatgggagtatctgggaagttgacccaccgtgatgtgtagtggctctacagagaacccccacaaaattagttttaaaaagactaatccaggaggtgcatatgggtgctagtaacttgtgctttgagccctcctggaggtgcttagacctccggaggagaaactgagacacataggagggcggcagtgactcagtggtaacacactgcggagtctcttttgcaagcagcacatactttgacctactccacaaaaccctaggccacatctccttttctccttttaaggaaacaaacaaacaaaaaaagtgggaaccaaataatctaagaacgaggagaaaaccagaagaatgacgcccctttcaggcactcctttggttttatggcacctcttcttgcaagtgtttgtgtgacatgaacttatatggtctttttgtgcagaagtacatgaaggaaaattcagagcccaaaggtcagcctgcaactgtaaagttcccaagttctctctctgctttcttttctgcctgcttgaagtccactgctacttttctaatgagataaaatccactgtttgcaatttctttttgaaaaccaatgagtttctactaatacctcatgattaaagttctgaagtaaaagctacatgatctttggttatatgagaatgtatgtgtgtgctaatgtgtttgtatacgtattttgttgtgttttggacacaaggcgctaaattggcttaaagagtcctcgtaaattaaataataagccaaaatgtttctcaagttcacatgacttaagtaaaatctttaataagttagctttaaaagtattggtaaaataggccaggcatggtggctcatgcctgtaatcccagcactttgggaggctgaggcaggtggatcacctgaggtcaggagttcaagaccagcctggtcaacatggtgaaaccccatctctactaaaactacaaaaattagccaggcatggtgttgggcacctgtaaccccagctactcgggaggctgaggtgggagaatctcttgaacccagggggcagaggttgtggtgagccaagatcacactactgcactccagcctgggcaaaagggcaagactctgtttcaaaaaaaaaaaaaaaaaagtattggtaaaataatattagaaatgtcttaagaattgccagcatacatttttgtttgcatttattgatcaagcaatttcatagttatccctgccaaatactattgaggcaggaaaatagcagagggaattggagtttggataaagggtggaatgagtaggagcagaagaaaggtgaagaggtgggtgcccaagcctgtcatgaatggtctgtgtaagtcattaataagaggatttatgaaaaaaaaaaaaccttttatatttcaagttgtatataaattaaacagaaattataatggtctttctagtgactgggttttgatccttaaaaaaaccacttatagactaaataattggatcaaaatacaaaattttcctaaggtattgctttactcttaatatattattacaagacactataatttttttacacaaagttcaacttttattgtgtcttgctgttttcagctttctctcctcttttaaaaggcctgaaataataactctatccttcaactaattttcagctcctgtaagtttttctcttttagtttctaactgttgtggcctcatgccaacatcaacaaaatgttttatcctagaggtctaaaggaaatgtttcctttcaatgtaatattccccataggaaacagcagttgcactggaggaggtcttttcttttgcctttagataactggcctaataaacagatcttacactttatcaaaataattcctatgtcattattactaagtttggtttggttagaaaaaaactgaaattaaaaaatttttttttaattaaggttatcacatccatgtattttctgtatgtgcttttttttttttttaaagagagtctcactttgtcactcaggctggagtgcagtggcatcatcttggctcactgcaaccttgtctccaggttcaagggattcttgtgcctcagcctcccgagtagctgggattacaggcacacaccaccatgcccggataatttttttgtatttttagtaaagatgaggtttcgccatgttagccagcctggtgtcaaactcctcacctcaagtgatctgccaccttggcctgccaaagtgctgggattacaggtgtgagccaccatgcctggcctgtatgtgcttttaaagtccttgtgtcactaagttacagagctttgacgtctgggtctaaaaaggacaccaagtcctgctaaatcttaaacactgacagcagttaaagcctcattttcagacctaatagaagatgccaatcaaaataaactgtgttcttgagacgcaggacaagaaagtaaaactattcaactcctcaaggcccaggggctattacagaagaggtgggcacatgaaattgcaagagcttacctggagagataaaataagttcagtttctctataaattaaccattgatgtcaaaggcacactgatgcaagaccagcatatgagcctctttgtcagattaacaaggttttcttggagcattgacccactccataataaagattacaatggtagtaaaaaggcttctggaaatcatatcttatgggcaagatgattaaaattttagattgtttacaaaattttgaataacaaatttaattagcctcatgctctctttattagggattattgtttgagaaattaagtgtcctctctcaaaaaataatggtttgcacctttttatgaaatctttgtggtatcactttggttaaatgaaggacttattttacaatggcctctgatcctattttgtgatgtcaagcactttaaagtttgtcaaatattttttgtcaaactttaaattgggtcctcattaatcttttcatattagttccctgaagtccgaaagaggcacattaagtttatttggtataaaaatcaaacagaaagcattgtcaaataggaaatggtgtttggctttctttgggctgtatttgtataaatatgttattggcatgtgttccaaaattatgagaaactcttgtaactgtgatatgacttcatgtatgttattaataattgtaattattatgtaaaattattgtatgccacagaagtaaccaaaagttctagtcaattgtgctttaatagtggctgtcctaagacttttttgtcatttatggacaattgttgtcttattttgatcctcttcacaaggtgatttggccgggtgcagtggctcatgcctgtaatcctagcactctgagaggcttaggtgagcagatcacttgaggtaaggagttcaagaccagcctggccaacatggtgacaccccctccctactactagaaatacaaaaattagctgggcttggtggcatgtgtctgtaacccagctattcaggaggctgaggcaggagaattgcttgaacccaagaggcagaggttgcagtgagccaaaatcatgccactgcactccagccggggccacaagagcaaaactccatctcaaaaaaaaaaaaaaaaaggctgggcgtggtggctcacacttgtaatcccagcactttgggaggccgaggtgggtggatcacgaggtcagcagttcaagaccagcctgaccaacagggtgaaacctcgtctctactaaaaatacaaaaattagctgggcatggaggtggcacacgcctgtaatcccagctactcaggaggctgaggcaaaagaatcacttgaacccaggagggagaggttgcagtgagccgagataatgccactgcactccagtctgagcgacagagcgagactccatcccaaaaaaaaaaaaaaaaaaaaaaaaattgttgctgatcctttgttttgttttcagagacaagaaaacttttcttatgagctgttggcagctgttaacaactgaggaaagtatactcctgtaaacaaattttggtgcatatttgtctctctgcttttgaattatctggaatttggaaactatttgtgagtattcataacttatggcaatacagttatttgcataagtgcaataagatttttttttagctggtcatggtggctcaagcctgtaatcccagcacgttgggaggctgacataggcggatcatttgagcccaggagttcaagtccagcctggccaacatggaaaatccccatctctacaaaaaatatgaaaatcagccaggtgtggtggtgcatgcatataatcccagctatttgggaggctgaggcacaagaattgcttgaacctgggaagtggatgttgcagtgagccaagatcacaccattacactccagcctggttaatagagtgaaaccctgtcttggaaaaaaaaaaaaagttttcttttgcaacagaataccatcagagaaaatggctattttaccaaggctttgactgaaatggtgtgctttcctttaaggaatcaaacttgattcatagagcccattaaagccccttggaaaactagtctcataccctgcctacagcatccctatacagggtttctgacctgtgttaagtaaagaatgtccctttctgataggcccaggaactccaagttatcttgggacctcaagaggagaggaatttacccaactcataggtatttggtgatacatggcaatggctgggcttggcttttaaaaagtcttacctgatattccttttgtggaacaaacttccatcaaagccaatataaagagtctgtgtgaaaaataatgattcttgctgcacttatacgtataaacaggccaagaataataaagcaaatcagtcataccatgattggtctttagtaaaaacaggaaactggagtgagaaaaattatgtttcaaaaactacagtacatctgttgttagactctagtctcgcctattgtttttcaatttttattattttctaaagtttggactgaattctaacttttctgggctacacatctccaaaataatgtttttaattttttccctccttcttccccgatttttctaatttcaaatcactaaaaactaagctgtgctttcttaaagccctgagaaccgaagctagacaacttaaatgtcagaagaagatagtaacagcctatttacatatataaggcactttcatacctggctactgatgtatgaacttcagagtaatatggcccatgtcaattttccgaaattgttatttttctgtttgttgtttctctccctttctccccccattttctctccgcaggacatgagacttcacaacgtgcaaaatgtgagctttcctaataatatgggacctccctctctaggaataaactgtcctagccatgagggatcagaggaaaactaagaacagagactcatgttcttctaaaatgatttctctgaaaaatttttaaaaagaaaaaggcattagatgggagagttaaaatcatcattaaaaaaaaccaggggtgggggaatgtgagaagtcctgggaggtggaggttgcagtgagctgagataacgccactgcacactagcctggaggaaagaccaaagactctctcaaaacaaaacaaaaacctcaaattgaatacaatattttataaactgaattggccttttccacatatgttctggctcctttgacatacataacgtcctgagttttaacaaattttgtcttgtagttattgtgtagtatgtaatattccaggccaatcttggagaagcaggcttggttatccctagtatgatttcaaggatgtgtagtctgttgtgagaactggttttaaattttaccacactgattacatttgtaaggtttctctccagtatgaatttggtaaagactgaaaacacactactgcttaaagtccctttcatgttcagcacattcataggatttttctcctatataaattctctcactccaaaagcatgaacatttgattttttttttcttttttttgagacagagtctcgctctgtcgcccagtctggaggcacgatcttggctcactgcaagctccacctcctggattcatgccattctcctgcctcagcctcccaagtagctgggactacaagcgcccaccacctcgcccagctaatttttcgtatttttagtagagacggggtttcaccatgttagccaggatggtctcgatctcctgacctcatgatccacctgcctcggcctcccaaagtgctgggattacaggcgtgagacaccgcacctggccgaacatttgattttttaaaaagtcttactacatttgttacatttgtaaggtagctcttcagtatgaatactctggtttccattttgatgttcaggtaaaagccttaccacacatattacgtttgtgtggttcctctcaaagttgtatattttgatgtctcgtgagttccgatgcctggggaaagtctctggcacatacgtgtagatttcctatcagtataaactcccttctgtccagtagggattgaactctggtaaaggttttgccacactcttttcatttgtaaagcatctctgcactatgaattatctatagatccacaagttttgatctttgaatagaattcttgccacacatactgcatttcagtaatttctctccaatatgtatattctttttttttttttttttttttttggagacaaagtcttgctctgtcgctcaggctggagtgcagtggtgtgattttggctcactgcaacctccacctcccgggtttaggcaattctcctccctcagcctccaaagtagctgggactatgggcacatgccaccatacctggctaattttttgtattttagtagagacggggtttcattctgttgcccaggctggtgtcaaactcctgagctcaggcaatctgcccacctcagcctcccaaagtgctaggattacaagtgtgagccaccacacccggccttctagtatgtacattcttatgccaagtgagtagtgaacaataccttaaaacttagctacatttactgcatgtgtaaatgtattgggccatatttgaattgctataaagaactatccgaggctgggtaatttataaagaagtttaattgactcacagttctgcaggctttacaggaaacatggtgctggcatctgctcaccttccgaggaagcctcaggaatgttaaaatcatggtggaaggaaaaaggggagtgggcatgtcacatggcaagaataggagcaagagagaggaaagttccatacacttttttttttttttttttttttttctggagacagggtctcgctgtcacccaggctggagtgcactggcacgatcttggctcactgcaacctctgtctcctgggttcaagtgatcctcatgcttcagcctcctgagtagctgggattacaggcatgcatcaccatgcctggctaatgtttatattttagtagagacaactgttcaccacgttgaccagcctggttttgaacacctggccacaagtgatctgcctgctccaacctccctaaatgctgggattacaggcatgacccaccatgcctaacgtgccatacacttttaaccaacaagatctcagccaggcgcagtggctcacacctataatcccagcactttgggaggccgaggcaggcagatcactaggtcaagaaattgagaccatcctggccaacatggtgaaactccatgtctactaaaaatacaaaaattagccaggcatggtggtgtgcacctgtagtcccagctactcagggagactgaggcaggagaatcacttgaacctgggaggcagaggttgcagtgagcctagatcacgccactgcattccagcctggcgacagagagagactccgtctcaaaaaagcaaaacaaacaaaaaaacaagatctcaccagaactcactatcccaagaagagcaaaaagcgggtggtgctaaaccattcttgagaaatccacccctgtgatccaatcatctcccaccaggccccacctccaataaaggggattaaaattccacatgagatttcagacggaagtgacaaatatacaagctatatcaataagtatgaattatttgaacccagaagttaggagaacatctaaaggcttttccacattgaattttgttttaagactctctgcagtatgttttgtctgatgtttagtgaggcctgagcgactaatgaaagatttgccacactcattacatttataaggtttttctccagaatgaatcatttggtgtttgttgaggcaagaaaaccgcccaaaggccttgccacattcaatacatttgtatggcttctctccagtgtgatttctttgatggtacaccagctttgacctttcaataaaagctttaccacattcattacatttgtaaggtttgtccccagtatgcattttctgatgattaaccagaattgaacgcactctaaaggctttgccacactcattacacacgtaaggtttctctccagtatgaatactccgatgacgtgctagtgttgattgatgacgaaagaccttgccacattcattacatttgtaaggtttctctccagtgtgaattctccgatgccttgcaaggttcgaagtggaattaaagacctggccacattcaatacatttgtatggcatctctccagtatgccttctctgatggtacgtcaggcctgttatatgactaaaagttctaccacaatggctacatttgtgtggtttctccccagtaggatttctgtgatatcttgcaagttttgaactttggataaatgcccctccaaactcattacaattgtaaggtttctctccagtatgaattatcagatgtttagtgaggcttgaacgctgagtataggctttgccacaatcattacatttgtaaggtttctctccggtatgaattttccgatgacgtgctaggcatgagtagtaactgaaaaccttgccgcattcgttacattgaaacggcttctctccagtatgaattctcttatgatttgaaaggtttccactgtcattgaagaccttgccacacacattacatttgtaaggtttctgcccagtatgaattcttagatgacgtgctaggcatgagtagttcctgaagactgtgccacattcattacattggaaaggtttctctcccgtatgtattctcttatgaattgaaaggtttccactgtaattgaagaccttgccacacacattacatttgtaaggttgctccccagtatgaattcttaaatgtcttacaaggcatgaattttcactaaagacctttccacattcaccgcattggtaacgtttctctctggtatgaattatcttatgtcgagtgagtaatgagccctgtttaaaggctttaccacatttatcacatttgtaaggtttctctccagtatgaattctccgatgccccacaagatgtgaagtctgactgaagaccttgccacattcattgcatttgtaaggtttctctccagtatgacttctctggtgccttgcaagttgtgaacgttgactgaagaccttgtcgcatacatcacatgtatatggtttctctcctgtatggattatctgatgtgtagtgaggctggagctccgtttaaaggttttgccacactcatcacatttgtaaggtttgtttccactatgaactgtctgatgagttgccaggttggaactttgactaaaggactttccacatatgttgcatttgtatggtttctctccagtgtggattctctggtgatttacaagattagaattctgcctgaagaccttgccacatatatcacattgatatggtttctctcctgtatggattatctgatgtgtagtgaggcatgagccttgtttgaaggttttcccacactcattacatttgtaaggtttctctccagtgtgaattctctgatgtattgcaaggttataactttgactaaaggacttgccacattcattacatttgtacggtttctctccagtgtgacttctccggtgatttacaagatctgaattttgtctgaagatcttgccacatacaccacattgatatggcttcccccttgtatggactatctgatgtatagttagtagtgagccccgatgaaaggctttgccacattcattgcatttgtaaggtttctctgtagtatgtaccatctgatggttaataagacttgaagacactctaaaggctttgccacaccctttacacatataaggtttttccctaatgtgtgttttctcaagttgggtgggtaatgacagctgcaaaaactcattctcatattttttagaaatgttggtttggacactaggaagaattctttgaagtggtgaaactagggaactgttattaactgtcttctcagattggttacactcataaattttcccttcagtttgaaatttctgcagttcagtcagacgtgactgaaagcttaatgtaagctgattttcaatacatttgttttctacatcctcttgactatgttgacctcttttaccattaagattgtttttataggtcattggcacttctttataatttatttcaccatctttccattgaaactcaaggtcctgtagatttttctggatttcccttaagtaaaaattttcaacatcataacattcatgtctttccagcgtcactgtttggcatttttctcctgtattactgttccctattggtggtaattccttggtcatacatttaggaaggatacctacaaaatataatgaacatgggagttttttcgttggtttttttttttgagacagagtcttgctctgttgcccaggctggagtggagtggcacaatctcagctcactgtgacctccacctcctgggttcgagctattcttctgcctcagcctcctgagtagctgggactacaggcacacatcaccacacctggctaatttttatatttttagtagagacagggtttccccatattggccaggctggtctcgaactcctgacctcgtgatccgcccacctcggccccacaaagtgctgggattacaggtgtgagccactgcgcctggccgaacatagattttaaaaataactagtattatttgtttttttttaaataactactattcataaatattttatattgaaaacatactacactaaaagtaacgtttatactagacagttaccaaactttaccacaatgatcttctatttttacaaataaaaaaggagtagaattcttcagtaaagaaagagtaatcacatgtaattcaaattaattttaaggaaacctagtttcaaacattcaatgactgaaagactcatgttgtgcaaacatatattagcactaaaacaagtatttttccaccatgcccccaaatcatacatcaactggcagcaaacatatggctctctcagaagagaaaatagttatatacatatatatttacttcatatttattgtgcatgaataaatgtcaaattacagctaaatatcaacaagttcaactaattaatgttctatataaatggcaagctagaattataaatcaaaaatagtactgggaaaatgagaaagaattttttgaagttataacactaagttatttttctgaatacttattatataagtattaaacctgttctaaaactacctatttctggccgggcgcagtggctcacacctgtaatcccagcactttgggaggctgaggtgggtggatcatgaggtcaggagttcgagactagcctggccaacatgatgaaaccccgtctctactaaaaatacaaaaattagccaggcatggtggtgtgcacctgtaatcccagctacttgggatgctgaggtaggagaattgcttgaacccaggaggcagaggttgtagtgagctgagatcgcgccacagcactccagtctgggtgacagagcaagactctgtctcggaaaaacaaacaaacaaacaaaaaactatctatttccataaaaaatagacatttgcaacactaacaagcagtgcaagtcagctatattgacttatgtctgccaaaactcgtatgttggggtcctaatcctcaatgtaatattacttggaggtgtgaactttgggaggcaattaggtcaccatggtagatagaatttcaggaacggaataggaatttgagtagatgtgaaaaagcttttgctttttgcacggcaatccttctgccatgtgaggacacagaaagagttagtcatgatacaccaggaaaatggcccacaccaagaaccaaggtgactggctctgacatgtggactgctcatcacccagatctgtgaaaagtgacttcctgttgtttaaacgaccctatctatggtatctgctatacctaaccacattaagttaaagctaatatgccatctcattataaacatgaaataatgttgatataccttattaaacaaagaaatttgtgagtctttactataaaacatgcaatattctaagctagcaaacagcactaacttgttttaaaaaatcttaagataaattatcactattttacaaataaggacagtaagactgcccacaggatttatgtatctacacccaaattacgaagaaagtaagacatgaacctgggtttccgggatcaaacatgtttttaaataaaactggccaaacagtcagtgcagataactggtcactccaaataccaagagtgtggaaagaaatacttcaagagccaatgtgtgttgccaaaacattattcagtcacccttcatgaataacagtatctgagccatcatcccctgcacatattgacatagacagtgttctcagaaagttgtcaagtgaatgagttacactgagtgtaacatggaaggtgagggagtactgcaataatgggagtgtaaaattaatatgctagtaagtaactgggtagtccatctggaccaaagtaatatgtttggaagaggcagggaggaggaagggcaagaggggagggcaaagagttataagcatggggcagcagcgtttgtgcttgcagagctgtgggtatataattgcccaaagaatagttaaaatcctgactttggaagaaaagagagatactaatttagaagtagcgtggtgactcacgcctgtaatcctagcacttcgggaggccaaggcgggcagactgccgagctcaggagtttgagaccagcctgggcaacatggtgaaactccgtcactactaaaatacaaaaaattagccgggagtggtggtgtgagcctgtagtcccagctactcaggaggctgaggtaggagaattgcttgaactcagaaggcggaggttgcagtgagttgggttcacgccactgcactccagcctgggagacaaagctagactctgtctccattaaaaaaaaaaaaaaaaaaaagtaccattatactgactaatacttaaatatgggaattctactaagggcacaggacaacaagggaagacattcaaaaaggggatagtgtgatgatatgggaaatgaaaggccagatgcagcattatgaagctttttatttgtgagtcaacaaggcttcagtctcagtcaaataatggaagggctcccaagaaagacaacagagaaaatacaaaaatacacgagggcagatcttaacttctagagcaaaattatccttacccaggaagaccaggttcctgtagttctccaacatcacatcccagtacaaagctttctgcacagggtccagggatttccactcctcctgagagaattctatggctacatccctgaatgtcaaaggtccctgaaatgaaaaacacatttcaacatgagcaatgggagagctcttatctatacataaaatgagaagaggagagaactgtcacatcaatttgattgtgtgttttcacatatccatgcaaggcatctgtgagaaggttatgtgtccctaatttaagtttgttttaaaattcaatagaagattatgatatcccgtaaatcagtgtaggcttctcatttttgtgtacaatgcaagaaatatacaaagaaatgaacacgtggttatctgtataagtattagatattatgttcaatatatcaactgagtgtccagatgagctagtatacaagtggtgtcttggagatgacaatgtccatagaagctttaaagaaaggtcagaaactaaaaactgtgatgaccacagcaacagcaatgactgaagttttggaacactccccatgtgctgggcattactccaaatgctttacatgttctaattcaaataataacataatagatagagagatagagagatttgttcccatgttactaggagacaactatgtcacagaaaacgctaaaaagtcacctaggtcaacaacctgaaaatggcagagcaggcatctaaatccagatgtctgagaatcagtcttgaatcaaaagaaacaaatggttaaattatggttacggtatgtcttagtctctctgtgctgctgtaccaagtaaaacagactgggtaatttatgaacaatagaaatgtatttctcatgattctgctggctggggaaatccaagatcaaggtgccagcaggactgatgtctggtgagagatgatcctcgcttccaagatggtcttgttgctgcacaggggacgaatgctgttgtccccacatggcagaagggacagaaagggcaaaaagcagtgaactccgtagaataagccttttgatatctcattgacgagaacaccatacccactgataaaggcagacttctcatgatccaatctcctcctaaaggccacgactcataacatttaaagattaggcactggggattaagtttcaacatgaattgtggaggagaaaaaaaaaaaaaactcagactgtaacattccacccctggcccccaaaattgatatacttctcacaaacaaaatacattctatcctaatggctcccaaagctttatttctacaaccaattcaaaagcctatagtctagagttgtatctaactataatctaaatcagatatgggtgagactcaaacatgcatttcatccaaaggcaaactgctttctagttgtgaacctatgaaagcaaacgagttatgtgcttccaaaatacaatggtggggcagacacaggttaaatatttcaattccaaaagggagaaacaggaaagaaggggtagctgttcccatgtaaggctgaaacccaacagggcatacacattaaacactaaggcttgacaataatctttgactccgtgtcccaccttctagacatcctggagtagaggttgggtcccaacatcctggggatccctgccctagtggttttgttgggatcaccccacatggaagttctcacagtgcctgcagctctcccgagctggaatcacataccggtgactctacagttttggggtctcaaaggtggccctgctcccagggctttactggaccttatcctaacagggactctctgaagttggccccacctccacagctagactgagcattgccttagtggggacttccagggacagcctcactcctatggcatttttatgcctaggctccaaggatctctgaggcattctttgaaatctagatggaagtaaccgtgagtccacatctcatgccctctgcacacttttagttagcactgtgttgatgttgccaaggtttacagtttgtgtgttgtaaccgacctcaatccctggtggactgaacaaagcgggtgaacgcgggaataaaagaaaaagacaagagagtatatttggaagaaggggccagggggcatcttgcctctagtggacaagggccctgagctttttcagccctccaaatttattaggtaaaagagataaccagaagtgggggtgattgttggtaactcagtcggccgtttggatcacagcaggcttgcaagactgcatccttccaacaataagctctagatttcccagtagataacttcaaggagcccggcgccagggagtgacggccctcagcaaaccttctggcggcaggcgcagtcgtgagtttgcccacatcctgcattcatggtaaacagtttgctgtttgatcatatagcctccagtggaatgctaagttgatcacgatccctttggcctttttagctcccaacagtgtgtgccctctggagtggtggctggtccgcacctggccccacttcagtcataggtggggtagccaaggacctctgctctgaaatacagagatcacagacctgaggtatcagagttccgaggtccgaagggcaccctgggccactcccttgaaactattctgccctcaaggccctggcactctggacctacaatgggcacagcagtctcaaagatctctaaaatgcctttgggatgattctctgattgtctcaataatcaggtcctggcttacttctatccatactaatctccttgtcagaggccacttggctacacccctcttggttttctctcctaaatacacttttaattctttacatggccaggctgagaattttccaaatctttacactgggctttgaaaacaaactgtttttaactcatttctctcttctcctgttttactataaacaggtcagagaagccatgcagcaacctgaacaatttgctttgagagtgtttctaacaaacatcttagttcatcactcttaaattctgctttccacagcccgggtgcggtggctcacgcctgtaatcccagcactttgggaggccgaggtgggcggatcacaaggtcaagagatcgaaaccatcctggccaacatggtgaaaccccgtctctactgaaaattcaagatgagatttgggtggagacacaaccaaagcctatcaactggtttctgtcttgcctgaatataatcactgaaaggaacaggatgaaaggttaggggccactgagaaaaaagaagattgacataaaccagtgtgtgcagtaacacggaaagacactaggtaagatctagtaccataggtgactgcagcaccagagtcttcaatagcgcagacaggtaacaggggagcttctgagtagaaaccagcaaacctcttcaattaggagatgacaagcaaaggctcagagaggacacaatccccagtcagaaaattataattgtgtgtgtgttgttgttgttttagatggatcgttctactgaactccagcctgggcaatagagtgaaaccctgccacaaaagaaggaaaagaaaaagaaggaaggaaggaagggagggagggagggaagaacaagaaagaaggaaagaaaaagtgagaaagaaagagagtaatggccgggtgcagtggctcacgacctgtaatcccagcactttggggagccaaggagggcaaatcacctgaggtcaggagtttgagaccagcatggctaacatggtgaaatcccgtttctactaaaaatataaaaaattagccaggcttggtggtgcgtgcttgtaatcccagctactcaggaggttaaggtaggagaattgcttgaacccaggaggcagaggttgcagtgagctgagatcgcaccatcgcactccagcccgggcaacaggagtgaaactctgtctcaaaaaaaaaaaagagaaagaaagagaaaggagggagggagagagagagagagagaaaaggaaggaaggaaggaaggaaggaaggaaagaaagagaaagaaaaagagagaaagaaagaaagactagagctaaaaataaaataactgagttgaaatagtcactagatgagttcaacagctgacttaatcagacagaagaaggaatcagtgaactcaaaggggattttgacagggagagaaacaaaaactataaaaaacagagaaaaatgaagagagcatgaggggctcatggcaaacaatcaagcaccaagaacatatgtattctggaagtccaataaataatgtgaatatatataacattacttaactgtaagtaaacaaacaagctttactgaaaggcataatataatcaaaggctgggttcaatggctcatgcctgtaatcccagcacttctggaggctaaggcaagcggatgacttgagttcaggagtttgagaccagcttggtcaacatggtgaaaccccctctctctgaaaaatacaaaaaaattagctgggtatggtggtgagtgccaatagtcccagctgctcaggaagctgtggcaggaggatcccttaaacctgggaggcggaggttgcagttggcccagatcatgccactgcactccagcctgggcaacagagccagattccatcaccaaaagaaagatgcatgcaaagaaaacgtaagcaagaaaaccttagatctaaaagaaacatagtattttatgatcactctgtgagccaggccttccagaaaaagataaaggaaaacatttatttatttttgcttttgtggtatgccatcctaaaagaggcactcactctttaaactgcccaacctggaggaaacttcagacatctgtggtaaagatagcatgcatacaggcagccacggtgacattctttgtaacagcaaaaaacagtaaaagacccatacgtcttcatttaggcactgctccaaagaggatgcaaaacaaactattagtgtttattaacataaaaatatgtacacttcaaaaacttgcaaaacaaaacttcacagcagaacattcactgaagaattgttttctgaaatctcataatgacgtgtaaatgcaacttgacacctctcactgactcttgccacagaacttgcaacagtagctccccacagaaacatgagggatggtggatgatgtgatagggaaaggaacctgggttcccccaggttgggcacttgaaagagtgatcgcttcctctaggatggtgcatttcctgctttgctagatctggcaagattctccactaccctgagctgcaaagcagccctctcccaccaacatcacacgagatttctcactcatttgaacaaaacctactactatgtttcttttagatgttgaagatctggggaaaatgataactctttgcatttccattttccatttcattaatttgtagaaatcaaaataaaataatcttcattctttgctcaatttttttttactgcattctagcagccatttcatattctgtagttaaattttcagaatatatatgccttaatgtcctttttttatttttatttttatttttggagacagagtctagctctgtcacccaggctggagtgcaatggtgcaatctcagctcactgcaacctctgcctcctgggttcaagggattctcctacctcagcctcccgagtagctggaactacaggcatgcgccaccacgccaggctaatttttgtatttttagtagaggtggggtttcactatgttggccaggctggtctctaactcctgacctggtgatccgcctgcctcagccttcaaaagtgctgggattgcaggcatgagccactgcgcctggccaatgtccttttttaagattataaatttttttttagcataaaactgaaatgtttccttgatgccccatgttttatgtttgcttataaattttatggtatatataaggtatacaacatgatattacagtatagatagtaaaaaaagtcactatggtttaacaaattaacatatccatcatctcagaggtacctttttttttgacaggaacagctaaaatctaacatagcatgaatttcatatataataaaatattattttcctatcatcttcatgttgtaccaacttcttttttttttttttttgagacggagtctcgctctgtcgcccaggctggagtgcagtggcacgatctcggctcactgcaagctccacctcctgggttcatgccattctcctgcttcagcctcccaagtagctgggactacaggcccccgccaccacgcccagctaatttttttttttttattttttagtagagacggggtttcaccttgttagccaggatggtctcgatctcctgacctcgtgatccgcccgcctcggcctcccaaagtgctgggattacaggcgtgagccaccgcgcccggcctgtaccaacttcttaatgcctcaactgcatctctgcttggacttttactgcaaacaaatatattatgtgatgtttaaaataaaagaaatatgatgttcagtaataactggtggaatgagagaatttggctccatcttctctaataacaaaggagttctgctcctacatctgagcaaaattataacctttttacataaaacaactgcgaagagtcccagcatgaacaccgcagtctctgtgggacggatacagtgacaatggctaaaagaatctgacattcaggttgattttatattttaaaatcaatgatgggccaggcacggtgggtcacacctgtaatccctgcattttgggaggccgaggcgggaggatcacctgaggttgggagttctagaccagcctgaccaacatggtgaaaccccatctctactaaaaatacaaaaatcagccgggcgtggtggcgcatgcctgtaatcccagctactcaggaggctgagacatgagaatcacttgaaccagggaggtggaggttgcagtgagccgagatcacaccattgccctccagcctgggcaacaagaacgaaactccgtctcaaaaaaaaaaaaaaaaaaaaaaaaatcaatgataaaataaacaccctctatcactgacgtgtgtatctaattgtccattccattcccagtcattaagattttgaagttagaaacagtgattaattcatacaccttcaaatgtagtataaaattaggcagaaaagatctcccctcataggtctcttttccagaatttatgaggtatcgtgcacattaatatgtgacttccgtgtgcagcttctctacttctggtctacagagagctgactgcatcctgattttgcctctaaacaatctctgctgccaacagctctgacattgtggggcccataccccgtctccatccgtgtctgggtgtgagtctctcccaggaccatgcccagtggagcctcttcccaagttaatgtcactgggtcgcagtgagatagaagctaaatgagatgagagaaactgagggaaggcatgggtgaatggcagcaaacgtgtcaggcaggatgcttcagactcagaggagattcgcaactccaatgtgtcgcatttcaaaaaggaaggagacagaatgatccactaagaatatcattttacctgtgtaagagccatccctgactccttttctttcctcttcttcctcttctgggcttctctctcagtcaatataattaattctttacaagtcaaatctgaaagtgaaaaatctgttgtttaatgcttggaaacaacacattcctttctgcgctacaaccatgcccacagggaagacctcagcatgtggagagacagcccactgcaccagggggatgcaaggataataaattcctaaacaaagaccaagtgtcctggcatggtggctcacgcctgtaatcccagcaccttaggaggcagaggcgggcagatcaactgaagtcaggagtttgagagcatcctggccaacacagtgaaaccctgtctctactaaaaatacaaaaattagccgggtgtggtggcatgcacctgtagtcccagctactcaggaggctgaggcaggagaattgcttgaacctgggaggcagaggttgcagtgagccgagatcatgccactgtgctccagcctgggtgacacagcaagactccatctcaaataaataaatcaatcaataaaaataaaaaagaaaatgtatgatgtgtctgtatacatatctttatgtgtacgtgtatttatatagatatatatagtatgcgtacatatgtataatggacttattcaaccatcaaaaagaagaaaatcctgctatttgcaacaacatggatgaaccatgcaatctccgcctcccaggttcaagcgattctcctgctatttgcaacaacatggatgaacctggaagacattacgctaggtgaaataagacagacactaaaagacaattactgtatgacctcacaagcagaattttaaagtatccaattcataggaacagggtagaacagttgttgccaggggctggtggtggggagaatggaaaaatgttggccaaagcgtataaactttcagttataaaatgaagaagttcaggggaatctaacgtacaccgtggtgtctatactgtattggacactttaacagtttggaaagtttttgaaaaatttaatgagttatagggtgaaagtttaaaaaaatgacaatacttaacatttagaaatgaatgacgtcagctgattataggatgccaccaaatcttatttcagaagtcagtaattatttatagaaaggcagatattgaataaactaacacttatctcaagcttccaaaataacgatgaattaagtggaactacaaagaaaaaagtaggccaggcgcagtagctcacacctgtaatcccagtactttaggaggccgaggccggcagatcacctgaggttgggagttcaagaccagcctgaccaacatggagaaactctgtctctactaaaaatacaaaatcagccaggcgtggtggcacatgcctgtaatcccaggtactcgtgaggctgaggcaagagaatcacttgaacctgggaggcggagattgcagtgagccgagatggcaccattgcactccagcctgggcaacatgagcgaaactccgtcccaaaaaaagaaaaaagcaaatccattaccaaaaaaaaataagactctgaatactcatacaaagatatacctcgtaggcctggcgtggtggctcccgtctgtaatcccagcactctgaggcagaaagactgcttgagcccaggaggttgaggctgcagtgagcggagatcatggcactgtactctagtctgacagagcaagaccctgtctcaaaaaagaaaaaaaaaaaaaaaagacataccttgtagtgacagtgacagtcatttatcgccccatttctcagttactctatcctctaccccatcccagggaagaaaagagttaccacgaatgacttaatttaaatgctctctggctaaacagaaattccaaatatcttttgatacaaataaatacaaaatgcacaagccttacagaaaagagtggtaattttcatcctcacgagtacaatttaaagaaatgaattttaaattagagtataaagtcacaaattagaatattacaaccaccatccatatccaatcaactcatcgctcatctggatggggtcctctcccactttcttcactattgtgtgtgtccctctctcattctgcacctttcctccccttttctgtttttctcctctttatgtctgttctgcccgatgctctgcaacttacttcacctctcgtagctctttctccccaatctttctgattgtccccaatctccacgtatttccgcctctttttccccatctgagctccctctctgctctccttgttaaaattccctcttacctgttacacctcctttgttcccactctctagcacccccaactccctaggcttcctccctgctgtggttctccctctactctgcttgtcacccactgccctctctccctctctttcagtcccagcaccacgtagctctgtcggctgcggctccaactctttcaccttctccccactgtctgtctgcagtgcctcctcctttgccgccccactctattttgctgcctttcatctctctgaaggtccccctttttttctaaatttctctgtgtgctttcctccccctgcttctttctccattcgttctctttcactcttgctgtctctttgcaaatccctaaattatcatccattttgccgtgtatttatgggtctccctcattctcttctattcggtctttccttttgctccgtcgctccccttcttttcctctcctgatccctctcacccacacattcagtaagaaaggggaggaataggatgcccacctcccggaaaagcatattttccagtggagtaaaatttgggaaggaagaacactgggtgtcacaagactcaggtgacctcccccaagggggggatcgagaaaagcagtggctgtgaaggggaagcctggggagcgaaaggacccggcgtgaggaggacacaaggtggcagggggtacggtgtctcaggacagggagggtctgcagaatcccaggacctgggaggagaagcgactccttcaggagccggacggcgggcgctcccctccaggggctgacgacggagaagctccggggtcgcaacgggcgggaatccacctcccgagtgaggactcgacttggcgcagggccgaagcagaggtcagtaagggttttaagcaggaacacgacctgagtggggttgtctacatggtcctaaggcagaaaggcagggagcaaggaacagcctcagagagatttttaaaccgaaagggaagcaattatcagacttacttggggcgaaggggctgttgctggtattttaaggtccgtagcgatccccaggaaacgggtatggacaagggaagactgccaagtgcacgttcgattcaggcagacggggcgaagcaaatgtttagtccaggtagacggaaactgacgcgcagcgctgtgatcttttccccgcgcgatctgcttccgggtgtgcaggaagctacacgccctgagaaaaaagactgagagacctggggcgggagaggggcctgggcggggtgcgacccgcaagggaaagggcagaaagactggccagatttgggaaccctgaaagggtggggcaaggctgatgcggtagtgggcggggccaggtgggctaagcgggacgggcggtgtgggcgggacctgtttggtgggcggggcctgttattcgctctgccttccacccagcaagtctttgttctcccgatttaggagtatttgtgactatttcttgtcctgtgaagcagcgttgcttcctgcctattttaagttaatgttttagactttaaggtcaaagcttaaagttgtggtccacttctgttggaaactaagatgttttcttcttgtcaagttgaactgatttaagtcaaaatcgatttttgcgagcctggtggactccatcgggtcttgccagtgaggctgaagccagttaaggctgaagttactcagtagtcagggaactaggatctccgtgaagatctgatgtgcagccgtggctggatccaggaaccctgaagacattatgctaagcgaaatgtgctagacacagaaagacaaatcctgcatgtgcttacttacatgtgcaatctacaaacatcaaaattacagtaacagagtagaagggtggtttccagggctgacggtctatcctgtgcctgtcccaccattgtattttggaagcaaatagcttctttggcttcacagtttcacagctggacagaaattttgcctcaggatgaaccacactttgagtctcacccatatgtgattcagataatatttgggtaatatttgggccttagagtttgatactgaaatggattaagacttttgaaatgggccaggagcagtggctctggcctgtaatcccagctctttgggaggccaaggtggaaggattgcttgagctcaagaattcaagaccaacctggggcaacatagtaagacccttgtctctacaaaaaatacaaaaattagccaggcatggtggctcacgcctatagtcacagctatttgggaggctgaggtgggaggatctcttgagcccaggggatcaaggctgcaatgagttgtctttgcaccactgaactgctgccagggcaacagagtgagactctgtctcaaaaaataataataataagacttttgagatgttaggatgggggtgaagggatcttgcatgtgagaaggacatgaattttgggagtccagagtacagaatgttatgagctgaatcacgtccctaaaaaatcattgttggccaagcgcggtggctcatgcctataatcccagcactttgggaggccgcggcgggcggatcacaaggtcatgagatcgagaccatcctggttaacacggtgaaaccctgtctctactaaaaatgcaaaaaattagccgggcgtggtggcgggtgcgtgtggtcccagctgctccggaggcagaggcaggagaatggcgtgaacccaggaggcggagcttgcagtgagccgagatccagccactgcactccagcctgggcggcaaagcgagactctgtctcaaaaaataaataaataaataaaataaaataaatcattgtctttaagttctaacacccagtacctcagaatatgactgtattttgaaatagggcatttagaggctattaagttaaactaagcttgttagaatgggctctgatgcaatctgactgatgttttgataagaggaaatttggctggaagcagtgcttcatgcctgtaatcccagcactttgggaggtcaaggtggatggatcacttgagctcagaagtttgagaccagcctggccaacatggtgaaaccccatctctactgaaaatacaaaaattagccaggtgtggtggcgcatgcctttagtgccagctactcgggaggctgaggcaggagaattgcttgaatctgggaggcagagcttgcagtgagccgagatcgcgccactgcactccagcctgggtgacagggtgagactctgtctcttaaaaaaaaaaaaagaaaaattagccgggtgtggtgtcacgcacctgtaatctcagctacttgggaggctgaggcaggagaatcgcttgaacccgggaggcggaggttgcagtgagccaagatcgtgccactgccctccaacctaggctcaaaaaaaacagtgtgtggcacctccccattctctgtcttcctcctgtctgggcatgtgaagtacttgcctccccttcaccttctgccataattgtaagttttctgaggcctctccagaagccaagcagatgccagcatcatgcttcctgtacagcctgcagagccatgagccaattaaacctcttttctttataaattacccaatctcaggtatttctttatagcaatgtgagaacaaactaatacactggcactacaggcatgtgccaccacacctgactaattttcaaattttttgtagagatagggtttcacgttgttgtccatgctggtcttgaactcctgggctcaagtgagcctcctgccttggccgcccaaactgtaaagtagataaaatttaaaaaatgtatatttttccaaggccgggggctgtggctcacacctgtaatcccagcactttgggagactgacgggggctgatcacgaggtcaggagatcgagaccatcctggctaacatggtgaaaccccgtctctactaaaaatacaaaaaattagccaggcgtggtggcacgcacctgtagacccagctacttgggaggctgaggcaggggaatcgcttgaacctgggaggtggaggttgcagtgagccgagatcgcgccactgcactccagcctggggacagagtgatactccgtcttaaaaaaaaaaatttccttcagatgagtaggtaattaagtaagaaagaaatataaatcttaaaaaagggctgggcatggtggctcacgcctgtaatcccagcactctgggaggctgaggtgggtagatcacctgaggtcaggagttcaagaccagactgtccaacatggtgaaacccagtgtctaccaaaaatacaaaaatcagcccggcatggtggtgggcgcctgtaatcccatctactcagactgaggcaggagaatctcttgaacccaggacaggaaggttgcagtgagctgagatggcaccattgcactccagcctgggcgacagagcaatacttcgtctcaataaataaatactatttttccttcctcgagaaactcaaagaaggctgatctgtatgtgatccgcaattgacttttcagtcagtggtcctttgctgtgacccacaggagtgtgacattctatggatggattcttctccctgagaccagaacttcatcttttgcatatgatcagaggcttttagaggctctgcattacttttcggatcaacaccattacacaagtttagcctagagacagctgacgtgggaaggtatcttatgaacaaatactgttgcactcggctctcttgcagggatcttgctgccccttaataatttcctccagggccactgaaagacgctagaatttttcctagatctgtctcccacacatacatagattggaatttttggataaaagctctgtttaggccgagctcgatggctcatgcctgtaatcccagcagtttgggaggccgaggcaggcggatcccttgaggtcaggagttcaagaccagcctggccaacatggtgaaactccgtctctactaaataaaaaaatacaaaaattagccaggcgtggtggtgcatacctgtaatcccagctactcgggaggctgaggcaggagattctcctgaacccaggaggcagaggtggcagtgagccaagattgtgccactgcactccagcttgggtgacagagtgagactctgtatcagaaaaaaaaacaacaacaacaaaaaacctctgtgtatcactctgagccccgcccaacctgtatctctagaaggatgatattctctgaggagacagatcttaggtgtctctttgcactgatgttattgatttagcaaggaaaacaaataggcaaatatcagtttatgctggtgatgggatctagtgatctcttacttgacttgggtctctgatttactcaaataatgataaaaattgattctcctctagatggcagaaaaacaagaggagctccagcccacacaggaggtagaaagtagaatctatgccacgtggagtccagtttgagttcagccataggcactgagtgtcctcccacaaagaaatggctctctattatttgaagggcactcttgttggcactgctgcctggagctactggacactgagagcgtgcatctcagaccagagttctaggcctgcatcacagagcgacggaacagcacaaaggttctttagtgcggagaagagataaaaaggagaaggtgagccctgaccctcctcccaccatccagtctagccaaccccagcaaatgtctgaaaccaacccaatcccttcactgttctttttcctttttcttttgagacaggggtttactctgttgcccaggctagaatgctgtggcacgcccaggctagagtgctgtggcacgatcacggctcactgcagcctcaacacctccaggctcaagtgatcctcccaccttagcctgccaagtagctgggactctgggactacaggtgcacaacaccacgcccagctaatttttgattttttatagagacggtcttactatgtttcccaggctggtttcaaactccagggctcaagctatctagccacctcagcctcgaaaagtgctgggatttataggtgtgaaccaccatgcccagcccactgttctttttttaaactctaaaaaatattatatcttttagctttttctctttcctttcttttttagacagggtcttgctctgtcacccaggctggagtgcagtggtatgatcaccacagcattgacatcccggcctcaggcgatcctcccacttcagcctcccagtagttgggactacaggcatgcgccgccacacctgttgggagccgaaaaggccaaagggatcatgaccaactcagcgttccgctggagactatattatcaaactgcaaactgtttatcatgaatgcaggatgtgggcacactcacactgccctgccaccaaaaggtttgctgagggcctcactccctggcaccgggctccttgaagttatctattgagaaatctagcacctattgttcgaagaatgcagtcttgcaagcctgctgtcaatcaaactgctgaccgacaaccccccaccgctcttgctatctcttttgcctaataaatacggagggctgtgtaggaggactgtgtaaagctcagggtccttgtccactagaggcaagtgccccctgaccccttcttccaaatatactctcttgtctttgtcttttattccctcgttcaccctcctttgttcagtccccctaggtccgtgccggctacacacacctagttaattttttttttttcctgtggagatgaggttccactatgttgcctaggctggtctcaaacacctgggttcaagggatccttccgcctctgtttcctaaactgctgggattataggcgtgagccacttgcatgtggtcccttcactcttctctaagcctccatctattccatttccatcccctcatcatatcaaacataccctttgggccgggcacggtggctcacacctgtaatcccagtactttgggaggctgaagatgggcagatcacttgaggtcaggagttcgagaccatcctgggcaacatggtgaaaccccatctctactaaaaatacaaaaattagctgggtgtggtggtgcacacctgtagtcccagctactcaggagactgaggcaggagaatcacttgaacctgggagacagaggttgcagtgagctgagattgccccactgcactccacttgggcaacagagcaagactctgtcttaaataaataaataaataaatataaaaaacatataccttggtaaaactttatttattccacatgtaactgagatctcatatgagtctagcatcactcttagagagctagactttaacctcattaatctatcatcctgaaagtccatcgttttcccacaaatgtttgctaattcccagggatttatactctcaggatctactatgtcctctattcaagctttcttgtaaaacttgtctttgctttaaattaacacagcttttctttctagtagcccccaaaaaaccacattcacagaaaagcctcacttagccatttggcctttttttattcatttttattttgagacagagtctcactctgtcacccaggctgtggtgcaggggtggatcatagctcactatagcctcaaactcctgggctcaagggatcctcctaccttagccttctgagtaggtaggattacagatgtatgccaccaggcccagtgtcaggcctctgagcccaagcctgcatgtatacatccagatggcctgaagcaactgaagaatcacaaaagaagtaaaaatggctagctcctgccttaactgatgacattaccttgcgaaactccttctcctggctcagaagctccccgactgagcgtcttgtgacccccgcccctgcccacaagagaacaaccccctttgactgtaattttccactacctacccaaatcctataagactgccccaccccatctcccttctctgactctcttttcggactcagcccacctgtacccatgtgattaaacatctttacttattattatttttttttccccgagatggagtcttgctctgtcacctaggctggagagcagtggcgtgatctcggctcactgcaacctccgcctcccgggttcaagccattctcctgcttcagcctcccgagtagctgggattacaggtacccgccatcacgtccggctaattttttgtattttgtatttaggggtttcaccatgttagccaggatggtctcgatcttctgaccttgtgatccacccgctttggcctcccaaagtgctgggattacaggcgtgagccactacgcccagcaaaaagctttattgctcacacaaagcctgttggtggtctcttcacacggacgcccttgacacccagctagtttttttgttttttgttttgttttgtttttggagacagggtctcgctctgtcacccaggctggattacaatggtgggatcatagctcaacctcctgggctcaagtgacactcctgtctcagcctcctgagtagctgggaacacaggcacacaccaccatgcctggctaatttttgaatttttttgtggagacgaagtctcaccatgttgcccaggctgttctcaaaccccagggtcaagtgatcctcctgccttggcctctcaaaatgttgggattacaggcatgagccaccatattgggccttttttttaagagagagatggggtcttactatgttgtccaggttggcctcaaacttctggccacaagtgatcctcctgccttggactctcaaacagttgggattacaggtgtgagccaccgtgcccaaccctggcctttattaaagacactgcatggctgacacacaaggaaagagatgccatccagctccatgggaaacagtttcgtaaccttattgtaattatttttcttccagtcccttctgggctgctcttgcattgggggcttgaagctcttcccttctacctgtgcagccccttaccctgctgtcctgctcttctctgtcctggttcctctctccctcaacattttatgttctccatctatataggtcaattttctcccaaatctattctccaatttgtacacttaaactcattttgatttggagaatgtgagtcttccctttaacataattgtgtcccttatgagagcagttagttttaaatggcaacattattttgttgctttaagttttttttttttttttcctaggaatcttagctctgcagggttctttgagcttttaaaaactactttatggccgggcacggtggctcatgcctgtaatcccagcacttcgggaggccgaggcgggtggatcacgaggtcaggagatcgagaccatcctagctaacatggtgaaaccccgtctctactaaaaatacaaaaaattagccaggtgtggtggtgggcgcctgtagtcccagctactccagaggctgaggtaggagaatggtgtgaacccgggaggcagagcttgcagtgagctgagatcatgccactgcactccagcctgagcgacagagcgagactccgtctcaaaaaaaaaaaaaaaatgctttattaggctaggtctggtggctcatgcctgtaataccagcattttgggaggcctaggtggctggatcacctgacgttgggagttcgagaccagcctgaccaacacagtgaaaccccatctctactaaaaatacaaaatcagccagacgtggtggcacatgcctgtaatcccagctacttggcaggagaattgcttgaacccatgaggtggaggttgtagtgagctgagatcatgcattgctctccagcctgggcaacaagagcaaaactccacctcaaaagagaaagacagaaagaaagaaaaactactttattgaggtatgattgacatataaaaaactgtagatatttaatgtatacaacttcacgtgtttggaaataagtatacatccttgaaactattatcacaactaatgccataaacttatcaattgcctccaaaaattcccttccagttcatttcttcactccgctttggttttgtttgtccttttgtgataacataagatcttatataagacctaccctttcagcaaagttttaaatgtacaacgccgtatttgttaatcatgtgccctatgttgtacggtaggcctccagaacttgtttatcttgcaggactgaaactttgtacactttcctttttgtttttgtttttttgctttttgcttttttaatttccccatgaaattaaaaaaaaaaagtttctcttcatgagaaactttgcacactttgaccaacaccttttcatttcctcccacctctcagcctcttgcaaccactattctgctttctgcttctgtgtgtttgactattttggattccacatataaatgaggtcatacggccgggcgcggtggctcacgctcctaatccaagcactttgggaggccgaggcaggcagatcacaagctcaggggttcaaaaccagcctggccaacatagtgaaacccagtctctactaaaaataaaaaaacaaaattagccgggcatgggggtgggcgcctgtagtcccagctactcaggagggcaggagaatggcgtgaacccagaaagcagagcttgcagtgagctgagatcgtgccactgcactccagcctgggtgacagagcgacactctgtctcaaaaaaaaaaaacatacgagatcatatgttatttgtctttctgtgtctgtcttattttactttgcataatgtcccttaggttcgtccaagtcatcacaaatgacaagatttccgtttttttcctttttatttgagacgcagtttcactctgtcgcccaggctggagcgtagtggtgcgatcttggtccactgcaacttcgacctcctgggttcaagcaactcttctgcctcagcctcccgagtagctgggattacaggtgtgcaccaccatgcccagctaatttttttgtatttttttagtagagatgcggtttcaccatgctggccaggctgctctcgaactcctgacctcatgttctgcccgccttggcctcccaatgtgcttggattacaggcgtgagccactgtgcctggcctgttttttttgagacggagtttcactattgtcacccaggctggagtgcaatgtccctatctcggctcactgcaacctccaactcctgggttcaagcgattctcctccctcagtctgccgagtagctgggattagaggcacccaccaacatgcccggctagttttttgtatttttagtagagacgggggtttcactatgttggccaggctggttttgaactcctgacctcaggtgatccaccagcctcggcctcccaaagtgctgggattacgggcgtgagccaccacgcctggcctagatttccatttttttaaaggctgaatagtgtgtgtgtgtgtgtgtgtgtgtgtttatccatttatcagtgaacatttaggttttttccacatcttggttattgtggcaataaacataggagtgcagatctctctccaagatattgatttcattcctttggatatataccatgaagggggattgctgaatcacctggtagttctatttttaattttttgaggaacctccataatgttttctaccaatttacattcccaccaatggtgtacaagggttccctttctccacatccttgccaatactatttcccgttaatattattttgtttttgagacagtctcgctctgtcgcccaggctggagtgtagtggcacaatctcgactcactgcaacctccacctccagggtttaagcgattctcctgcctcagcctcctgagtagctgggactacaggcatgagccaccatgcccggctgttttcttttgtttttttgaggcagagtcttgctctgtcatacaggctggagtgcagcggcacattcatggctcactgtagcctcacctcaatctcctggaccgaaccaatcctcccacctcagcctcccaagtacagtagctgggaccgcaggcagatgccactatacccagcttatttatttatttatgtttgagatggagttctgctcttgttgcccaggctggagtgcagtggcgtgatctcggctcactgcaacctccgcctcccgggttcaagcgattcttctgcctcagccttcctgagtagctgggattacaggcatgtgcccccacacctggctaattttgtatttttagtatagacggggtttttccatgttggtcaggctcgtctcgaacgcccaacctcagatgatccgccacctcggcctcccaaagtgctgggattacaggagtgagccaccgcgcccggctatttctatattttgagacggagtcccgctctattgcccaggctggtgtgcagtgatgtgtgatctcagctcactgcgacctccacctcctgggttcaagcgattctcctgcctcagcttcctgagtagctgggattacaggagcccaccaccatgcctggctaatttttgtatttttagtggtgcacatgcctgtaatcccagctactcgggaggctgaggcacaagaatcccttaatcccaggagatggaggctgcagtgagtcgagattgtgccactgcactccagcctgggcaacagagagactctgtctcaaaaataaaaataaaaaaaaaaaaaaataaaaaattcaaggttgcttgaagaagatataagactccggtgtcaggtccaacagactttattactgacaacacagcaaagaagcaaaaacttgatactcacgtcaatccccttgcacttcaagtccaacaggactgatgagaaagggtctggacagatgctttgcatacagtgagtgtgtaatgcagtgagtgtgtgccagaatgaagaatcctgagcttataaagcaatcttttaagagggccacaggaagacctccccaacctttgcttctgacatatgcatcattatatatattttttacagtggttaggcaacaaatctgcctctggccatggggactcgctgttgctatcttcctaaaccgtttgctatacaaacattcttggccgggcgctgtggctcatgcctgtaatcccagcactttgggaggctgaggctggtggatcacctgagatcaggagttcgaaaccagcctggccaacatggtaaaacccccgtctctactaaaaatacaaaaattagctgggcatggtggcggacgcctgtaatcctagctccttgggaggctgaggcaggagaattgcttgaacccaggaggtggaggttgcagtgagccgagattgtgccattgcactccagcctgggcgacaagagcgaaactccgtctcaaacaaacaaacaaacgaaaaaacacaaacaggccgggcgcggtggctcatgcctgtaatcccagcacattgggaggccgagatgggcagatcatgaggtcaggagtttgagaccagcctggccagcatggtgaaactccgtctctactaaaaaaatacaaaaaattagccaggcatggtggcacgtgcctgtaatcccagctattcgggaagctcgggcaggagaattgcttgaactcgggagggggaggttgcagtgggccaagattgagccactgcactccagcctggatgacagagcaagactccatctcaaaaaacaaacaaacaaaaaaaacccaaaaacattcttgataagatagtctggaacaaaagctttaaaaaatgtgaagatatgtgagatgccctgggagaattatctaccaacatagtgtacatttccctttaatacacgggaatagtcaatcttctgaacaaaaagatcccctggctgggcacggtggctcatgcctgtcatctcagcactttgggaggctgagacaggcagattgcttgagtccgggagtttgagaccatcctgggtagggtagagagaactactcaggctgagtgagcttctagacaggacaaataaaaagagcattgcaagtagggttttacaggggggtcacttgacaaggcaaataatgacaatttcctgggactgggactttgaagggactccagccctgttctcctcctgccaatggttgccaggttgctgttcctctctgacggagactgctggctttcaagtctaccgtggatcagtggagggacaatgaaatagggcaagttaaaaaaaaacccacaaagcttgctattcttcccaagattcagctgttttccttgaaagcgatgaatatcatccctagattgctgcaaactcttagttaatttccaaagattaaaaaaaaaaaactgtaaccccagcattttggaaggccgaggcaagcggatcacgaagtcaagagatcgaaaccatcctggccaacatggtgaaaccccgtctctactaaaaatacaaaaattagctgggcatggtggcacgtgcctgtagtcacagctactcgggaggctgaggcaggagaatcacttgaacccaggaggtggagactgcagtgagctgagattgcaccactgcactccagcctggacgacagagtgagactccatctcaaaaaaaaaaaaaaaaaaatgatgctgaaattgcttttttttttgagatggagttttgctcttgtcaccgaggctggagtgcaatggtgccatcttggctcactgcaacctccgcctcccagattgaactgattttcctgtctcaacctctccaacagctgtattttcagtagtaaggccttgggaaggtcattaggtcatgatggtggagccctcatgaatgggattagtgtccttataagaattctgtcagacacagtggctcacacctgtaagcccatgactttgggagatcaaggagggaggatcagttggggccaggagtttgagaccctgtctccacaaaaaagtaaaagtaaataattagctaggcatggcggcgaatgcctgtagtcccagctactcaggaggctgaggtgggaggattgcttgagcccaggagtttgaggccgcagtgagctgtggtcatgccactgcactccagcctgggtgacatagtgagaccctatggcaggatctcaccattttttcctccaaaaaaaaaaaattgttaaaaaaaattccagtattgtgcagtagctggatgtttcaaattttaaaaagaagaaaataaaaaataaaataagagtcttgatagaacttgcttctcccttccaccatgtgagaaggacacagctagatggcaccatctacgaatcagaaagtggaccctcaccagacgctaaattgctggtgccttgatctcagacttcctggcctcccaaactgtgagaaataagtttctgttgtttataagctacccagtttatggtattttgttacagcagcctgaactaagacacgttgcaacttccactttccattcaacatatatcgtccccatttctcttactccatacatacagatctaagtggtttttatgaaagttctttaataatccatagttggtatgtccgatattttatgcaataatctatcaaatagtggactttcctattttacatatgtagaaactgaggatcagggccgggcacagtggctcacacctgtaatcccagcactttgggaggccaaggcggatcacttgagcccaggagttcgagaccagcctaggcaacatagtgagacccccgtctgtacatttttaaaattaaaaaaaaaaaaggccaggtgtgatggctcacgcctgtaatcccagcactttgggaggccaaggcgcacggatcacctgaggtcaggagtttgagaccagcctgaccaacatggagaaaccccatgtctactgataatacaaaaattagctgggcatggtggcgcatgcctgtaatcacagctactggggaagttgaggcacgagaatcgcttgaacctgggaggcagaggttgcggtgagctgagatcgcgccattgcactccagcctgggcaacaagagtgaagctccatctcaaaaaaaaaaaaggaaactgaggattaggaaagcccaagacccaacatcaggaatgtctcctagtcccagaatctcttgcatttgtacaccccaccccactatgaactcaggcatagtaaaataatccaaaatcccccatcaaatattttatatatatacatatatatgtgtgtgtatatatatatatatacacatatatatgtgtgtgtgtgtgtatgtatatatatatatatatatatatatatatatatatatatatatacatacacatatatatgtatttctattttattttaattttttttgagacagggtcttggctgttgcccaggctagagtgtagtggtgtgatcatggctcactgcagcctcgatctcttgggctcaagtgatcctcttgcctctgcctcctgagtactacagggatatacctgatgtactacaggcatgtgccaccactcccggctaaactttctttcttttttgcagtgacaggggtcttgctatgttacccaggctggtctttacctcctggcttcaagcaatccttcctccttggactctcaaagtgttcagattacaagcatgagccaccaccacacctggattgtatcattatattaaagctgagttttagtcaagcaagcctttggagtcagactgcccaggttcaaattccagcacccgatgagtggggtggctcctgtttgtaaccccagcactttgggaagccaaggcaggtggatcatttgaacccaggagtttgagacgagcctgggcaacacagtgagaccccaggggtctctacaaaaattaaaaaattacccgggcatggtcacacatgcctttagtcttagctaccgggcattgggggggccgaggtgagaggaccacttgagcctgggagatcaagactgcactgagcacagaacagattgcgtccctacactcccagcctaggcaacaaggcaagaccctgtctcaaacaaacaaacaaattccagcaccactattaccatctatgagaacttggacaaattcctaaagttctctatgcctcggtttcctcatccattaaattaggatgatgctgctactttacatatatcatagagttattgtcagggttaaatgaattaatttactgaatacactttactgtagctattatcactggcattgatctgtataggtattgatttgtataggtattgatctgtataggtattgatctgtataggtattgatctgtataggtattgatttgtataggtatttgttaaatacttattaaagtttgcagttttgttttgcattttggaatccataatttgtttttattttgtttctgagatttataatgcctcatttaagcctctgaaaattcctaggccctaagcacttcaaaggccaccagcccaacatcccaagcagcctgacaccaagacaggcacgcatagctaaaaagatccctagcctcagagaccttggggctgagaggagtcctgggaatagggagggctgggactgaaatattcaaccccatccccacttttatgagcagcagtttcctaactgcagtgggtaagggtatttgaaatagatgctgggccgggcacggtggctcacacctgtaatcccagcgctctgggaagtccaagtgggcggatcacctgaggtcaggagttcgagaccaaagacagccaacacggtgaaaccccgtctctactaaaaatacaaaattagccgggcgtggtggctcatgcctgtaaattccagctactccggaggctgaggcagaagaatcgcttgaacccgagaggtggaggttgcagtgagcagagattgagccactgcacttcagccggggcaacaagagcgaaactccgcctcaaaaaaaaggccgggtgcggtggctcacacctgtaatcccagcactttgggaagccaaggcaggcagatcaccctgaggtcaggagtttgagaccagcctggcccaaagtggtgaaaccccgtctctactaaaaatacaaaaattaaccgggcgttgtggtaggcgcctgtaatcccaggtactctggaggctgagacaggataattgtttgaacccaggagacagaggctgtagtatgccgagatcgggcccctgcattctagcctgggcaacagagcgagactccgtctcaaaaaaaaaaaaagaaaaagaaaaagaagaaaaaagaaatagatgctgtgggtattcagatctgtcagagtgctagctcagcctagcccttcaagtagcagaataaaggaggaaagagcatcccaggccttcccatccccattcaactccctcagttagagtggtcctaagattgcggtgggggggtagggctgtgttgaagaggttaaaaacagagattagtcagatccaatcctgctcccactctatggaggaaacaaattcgaatacatagtcacagcccaggctctgggattgagagacagagagagagattggattggagagagagagagagagagatgggattggagagacagagagatagatgggactggagagacagagagaggggttctgtggctctggaagcctagagaacagagcctgaagacagagaggaaagggagtaaaggggaggcatttatgcagagatctcagaagtgaatatgaaaggcacccctagcagaacgcacagcttgggcaaggaggcttgctggcatgaaaacgcaagaagtgctcaggcagctgtaattctccaggacatcagataaaaggtaaaaaacagatgggagacgcgcctagacagggtattgaataccagcccgaggggcttgggtttcatccaaacagcaaggcaactgagctcaacacagtgagactcggtctccacaaacatttttttaaaaattggccgggcctagcggcgcgcgccgatagtcccagctatttctgcaggctgaggcgagaggatcatttgagctcggggaggtccaggcggcagtgagccaagatcctgccactgcactacagtctgggcaacagagcgagaccctgtctttaaaaaagtaaaaaaaaaaaaaaaaaaaaaagaaagaaaaagaaaaaagagagaagggcaagtcgctcccttctctgggccttggcataaatcaagcacaaatcaaagtctcactccctcctcctgccgcgcaacggcgcggagagccagccagccagccagcggaaccacggcctggtaacccaaaacctgcacaccctccagctccccacaggacgtcacgtattaccaccgacgcacgcgcagaagccttcccggggactcaagaaagggcaggcttagcctcctccccatgtcgcccctcattggctagaaactactgctcgtctcggtcgttgttagcagcgaccagggcgggtacaatcttggtcgctaggacacggctaacttccgctttcttccccctctcctaggctcaaactagtcaaatcttgttcactcgaccaatggcaaatcggaagtgggcgggacttcacaagtccggaccaaagaaacgcgagcttagccctgggtagcgcggccaatggccgtggagcagcccctgtaaactggctcgggcgcccccacgcccgcccttccttcttctcccagcattgccccccccacgtttcagcacagcgctggccgcagtctgacaggaaagggacggagccaagatggcggcggccgacggcgacgactcgctgtaccccatcgcggtgctcatagacgaactccgcaatgaggacgttcaggtccggaggctacgggggacttggggaagacgcggaggggtacctgggggcacgggcggccctcgcggagaagactcagcgttcgctgggagtggcggaagggggcgacggccaatcagcgtgcgtctcttatctccccggttgcccggactccttgagacggcgctcccgattgggtgtcggcccagtggagggcgggggccagcgctagcctcgagggtcccgggcctgccctgtgcgcgcggcggtccgcggtcctgggaggttgtggccagggctggggtctgcggactgggtctgggagagaggaggactccgtgattggcggcggcctctgaatggcctcttggggatgtggggcgcgcatgacttgctccaagtaggggagggccgccgggtgggtcgggacctgggaaggtttttttgttttctgggtttcgactgctgggccaagtggggaccgagaggcgaaggcctgccatcctaattcctgctcttcctccgcctctcattttggtttaggtgtcctaagaggacggggacgcaaaaacacccccccaccaaaggtggggactagccaagtttaggagcgaattaggttgtagaaacccgcctccccatctccccggatcctcccattgaccaggataggggttgagggatttgctaagcagatgaacatttatttatttcttttttttgagacagtctctgtgtcgcccaggctggggctggggagcagtggcgcgatctcggctcagtgcaacctctgcataccgggttcaaaccatcctcgcccctcagctccctaattagctgcgattaccggcgcgagccaccacgcccgactaatttttgtatttttagcagagacggggtttcaccatgttggccaggcttggtcgggaactcttgacctcaagcgatccacccgcctcggcctcccaaagtgttggaattacaggcgtgagccaccgcgcccagcccggatgaacattcctggttatgggatgaggtgacccaaggctctgagccgggctggtgtgggattgagaacagttagaactgcaagtccacctcccacctgctgtgtgaccttgtgcaaattacttcaccgctttgggtctctgtgttccataaaatatgggctaattgtagtcctggtcttgctggagggacttgtgagggactgaacgaattatgacacaaataaaaagtagaatggtgtcaggcctgttgtaagggctcgataaatattagctgtaattattgggagtggtgattaaagaggtcccatcctccctttaggtctgttttcccatttataaaattggacaaggtgcactgggtaacctgccaaacgtgggtctcgcctcctaggttcctggtatatcactgtttctggtggcatacaggttgtggttgtattcccggcccttccacttgttactgattgacaagggcaagttagttaatctctctaggcctgtttcctcttctctttaatggggttaattacctagttcatagggcggttgtatgaattcttttgttcagtaaatatatgccatgtatgagatatgatgctggggatatagtggagacaccagttgctatacaggatccagatgtgaaacaggtcagcagagctgaatagatgagtgtttgaaaagtgatgggaaggaaacaaataggatgtagtggtagcgaatccatattgaattgggcctctattctgtgcagggcgctgttctaagcactggtatatagcaggaacaagacagaaaaaactctaggccttggggagtttattttgtagtgaggagagacagacaataaacagagtatactggggataagcattagggagacaaataaaaataagagagatggggtatatatagggcatgcagttttaaagtgtggtcaggggaggccttgttgagatcctgtttgagaacacgcctgaaagcagagggcacagcaagtacaaagtggggtggggcagatccattttaagaaggccaatcaggcaaggcccctctgaggatgcagagtttgagaagagattgaaagaaggtgggggagagcctcccaggaagagggaacagatatgtaatggcctttttttttttttcttctttttttgagacggagtcttgttgctctgtttcccaggctggagtgcactgacgcgatctttgctcactgcaacctccacctcccgggttcaagcaattctcctgcctcagcctcttgagtagctgggactacagacgcaggccaccacgcctggctgatttttgtgtgtgtgtttttagaagagactgggtttcccggtgttggccaggctggtctcagactcctgatctcaggtgatcctcctgcctcggcctccgaaagtgctggaattacaggcgtgagccactatgcccggccagttttttgttttttttaactccaggatcacttccttcagctatctatcctcccatcttttcattcatccatccatccactaaccagcagacatttgtagggagatgtctttgtgccaggatcagagctaggcagcttaccggtttattctaaagaatattgcaaaggatacagatgaagacacatgcagggtgaggtgtgggggaagttgtgtggagcttccatgccctccctaggcattccaccccccaggaaccgcgaggtgttcatctgtctggaagctcctatggctgcttttgtgctacagcccagagttgcatggttgtaacagagatggccgcaaagcttcaaatatttgctgtctaaccctttgcagggaaaaaattgctgacctctgacttaaaccatctgcgtaacaaattattgggtgcttgctctatgttaggtacagtacagaggaatatcactgacgatcttactgaattctcacaatcactctttgaagtaggtcctgtccttgtccacattttccagatgaggaaactgaagcaccataaataacatggccaaagctgtgcagctgagaaatgaaggagccaggaaaggaagtaggacctaagggtggaatagaatctggggtgggacacacggttgctgattatattcatatgccagacattttaattgtgtctgagacagttcaggatactagaaggaacatgggacatgaaatcctgtagtcttgatttatttgttcagcaaatatttatcagcacctcctgtgtgccagactctgttttagatactagacatacagtagggaacaaaacagcaaagctgcccttgtggggtttacattctggtttgggagacagatagtagatctgtagtgggatgtcagtggcagtaattgctaagaagaaaaattgctggacgtggtggctcaagcctaattgtaacactttggttttattttattttattttttttgagacagagtctcactctgtcgtccaggccgtctctgctcattgcaacctccgcctcccgggttcaagtgattctcctgcctcagcctcctgagtggctaggattagaggcgcccaccaccacatccagctaatttttgtatttttagtagagagtgggtttcaccatgttggccaggctggtctcaaactccctgcccgcctctgcctcccaaagtgctgggattacaggcatgagccaccacccctggccaattctagcactttggaaggccaaggtgaaaggatcgcttgagcccaggagtttaagaccagcctgggcaacaaagtgagaccctgtctctaccaaaaaaaaaaaaaaaattagctggtgtgatgacacaggccttggtcccagctgctcaggagactgaggtcggaggattgcttgaaccagggagatcgaggctgcggtgagagcctgggcgacagcaagaccctgtctccaaaaaaaaaaaaaaaaaaaaaaaagaacaaaataagacaggtacagggaatagagcaagcacctggggctgctttgttagatagggaggttagagaaagctgctctgaggaagtgatgttgaacaaggatttgaatgaaatgaacaggtcgtggaagagcagtctgggcagagggaatagttggtacaaaggccaggagtgggaggatgcttgatgcgttcaaagcacagcaaaaaggccagtgtgactgaggcagagagaatggcaaagtggtgggaggtgaggactagaccaggactagatcaagtgaggcctgtgggccaaggtgaaggccttgaagatgggagggaggaggaggaattgcaaggctttcagtagtaattatgggttctggtataattttaaaggatccttcctctggctgtcataggggttgggccctgttgaggtgccattacaaagcacccaggaccagtgttagcatgcaggggggaagtatggttacagtcaggacatgttgaggggggctgatgggatttgctggtgggtaatgtagagggaagagttgagggtgactgaagtttgaacccccgctctgccagttgtgctctctgtgtgcccctggagcagtactttcccctctttggacccagattcctcatctgcaaaatggggataatgatgaagaatcagcgtgtgcctggttgtgaagatgcagtgaaattggcttgctcattgttctgcggtagtcatatggtggggattgagcagacctgaggaaatggggcatctggggaaccgtgtgggaccaagtcagcaagtgctaaagcctgggttgggaatacactgggctgtttgtttttttggttactatcaaggaagcagttgtgacaagccaggcccagtgagaatggatcagtagactagggtcagattgtgttgggccttgtaggccagagtaaggccttagcttttattctgaatgtgcagggaaaacatactacatgtgggattataccatatacattcatattatggaaggctccatgggttgaatgcagggtggatcttcaaaagtgggtcccctttccacaggtgcatatagtgggaaggcggattttatttattaactcaccacagagcaggctctgtgccgaggcctgctgggacacagagagtcccagtctagggtggtaagtgctgtcatggaaccatatgggtggactctttggaaaatcccaattcctattctctcacttaacacaacaatcaacaacacagaagaagacttccgtgactaaatgtgtgttggggtggggagggattcttcaccaccactaagcaagcattcagttctgcagcacacgccaactggatgtcctccaattcagttcagacacgacctggagacagtgttggatccaacaggttgagggctcaggcctcaaaactgccccttggccctcgccttcagttgccattctgggtcgtcagaacttctgatctacctgcttcaagttggagttcccatgaccaccctgcctttgggtttgattaatatgctagagcagctctcagaactcagggaaacatgtaagtttatcagttcattataaaggatagtataaagaatacagatgaagagaggcatagggtgagctatgggggaaggggtgtggagcttccatgcccttcttgggtgcaccaccctccaggaacctctgtgtgttcggctatgttgaagttcccaggccctgtccttttgggtttttataaaggcattgttaggtaggcaggattgattaaacctggtgatcaccttgaccttcagcccctctccgatccctggaggttgtggggtgggactgaaaatcccaaccctctaatcatgcctctctgttttccatgactatctttccagtgaccatggaccccatcctgaaggtatcagtcaacattagcatacaaaaagcgccttggagattccaaagatttgaggagttgtatgcaaggaaatggggatgaagcccaaatctgtatctcacagtatcacaactgtagcaggtgcttggtggggacacacttgggagatagtcagtgcacagggaattctcaggatatgacatgatcaatggccagtcaaggtttctgaaatgatattaatagattttctatcaggaatgtgacggagaccccaacctagagttgtttaaacaagtaagagttctctttatttctcatatagcaagttcagcagctcaaagctatcacagaattgggtcagctcaaagatatcacagaaatgcggtttttttgactggcctgttttggttataagattccagcagcatctgctgtcctagtggaactgcactttttagtgcagtttagcagaggccagcttaggacacagaggttctttccctcctcccttttatgaaggaggaaaatctctcctgaatctcctcagcagacttgcttgtatatctctttgccaagaactaggtcatatgcagagttagttgaagttaagtttggctgtaagtagtagaaaaactctaaataacaggggcttaaatgagcttgaagtttctatctgactgatgaccaaaatgtctggtggcaatccaggctgctgtggcacttcatggtgtcagggtcccaggctcttaccattatgcgctggttgtatcctccattctaccctccgtgtcccccaggttacctcaggtccccaagttggctgccgaagccccaaccattatagctccattccagacaggaaggagggaagataagtgtgacccccatccctataagttgcacaaaacatttccacttggattttattggccagatgttagttttatagtcacattcagatgcaaaggcaattcagaaatgtcttttccaggggtcatgtgtacagctgaaaaccaaggattatgaacagcagtatagccccatgcaggagctcctaacttggggatcatctgcaattcccaggcaggtccatgaatttggatggcaaaaataacatctttattttcattaacctttaacttacatttaacttcccttctgttatagattataatatcactatagtatatcataggtagcgttagcaaaacctgtgacttaccagtggaaatcaggagttgtgttcacatgtcatttctgctattatacatatcttctagtgttgtttatgttcacctctttcaaaattgcgttcattattagacctgctaaggggattcatggcaccaccccacccctctacaagagaaaaaccaaaaaaagccgggtgcagtggctcatgcctataatcctagcattttgggaggtcgaggtgggaggattgcttgagctcaggagtttgagggcagcttgggcaacatagtgaggcctcatccctacaaaaagttaaaaaactagctgggcttggtgacacctgcctgtagacccgtctacttgggtagctgaggcgggagaatcacttgagcccgggaggtcaaggctacagtgagctacgattgtgccactgcactccagcctgggtaacagagtgagaccctgcctcaaaacaacaacaagcacaacaaaaaagaaaaaacagagcaaatatgaatccatagtactggttaagaacctggtggctgggattcaaatcctggctttactaccagtaagctgtatgcagttaagctccctgtgcctttgtgttctctgcctcaagacgggggattctgtatttccctcatgggattgtgagggtcaaatgaattaaaacattaaagcctggggcatagtagagactaaggaaatatttactgttattattctgtcatggtgaaaaaagggaaaagaaacatcagtggaccagctgccacgatgtccttcttaataatctgaacaaaatcaggatgctgtcagtgaggcgtggttgccacggctgccattattaatcttcccctggtgctagggtgtccctgtagaatgtcattttgtactcaagacaaccctctgagggtaggtattctcatcatccccacttcacagatgagaaaattgaggctcagaaaggtacaaggattgcccaagattccacagctaatatgtaagcagtttagccttgaacctggacagtgcagctctgtagtaccaccctaggccatctttctcaagcattgatgatgctgtctgcctgaagaaacacttttaatgaaaccaaaagcagaatcccaaagaacagcagtggaaggaagggagctctctggatgggaaagcagcctgattgtcatgggcccacctcttgggcatccccagcttcaagttggggttcccacgaccccctctttgggtttgattaatttgctggagcggctcacagaactccaggaaacacttaggtttaccggtttattataaaggatattccaaaggatacagatgaagaggtgcatagggtgagctatggaggaaggggcggggagctttcgtgccatccctggggatgccaccctccaagaatgtgcatgttctgctatcaggaagctctctgaatcctttcctctttggtttttatggaagcttcatgatacaaacatttttgcctaaatgacagtatgatattgaaattgagtcaggctgcctggcttcattgctttccagtaagtgacagcctcacctctgtgcatcagtgtcctcactcgcctctgtgcatcagtgaagtggggacgctgctaacaatacatacctcagagcagttatgaggattcagtgtgttaatcatccatgtcaatcacttggattgctgccaagcacgtagcaaacaataaatgtttgttgctattgttctggcatttatgattatgattattaattgtaattattccctgtaccatctcattgtcctcagggctgttgctcacctagtatggccctagcccatgtgtatatttccccatagctcaggctgagagaagaacacacagatcaacttggagaaaacaaagaggaaagaaataggcaactaggtcaatactccccacagtattttatgttattttattttatttatttatttatttgagacagagtctcactctgtcacccaggctggagtgcagtggcaccatctcggctcactgcaagctccacctcccaggttcacgccattctcctgcctcagcctcccgagtagctgggactataggcgcccgccaccacgcccggctaatttctttttgtatttatggtagagacggggtttcaccgtgttagccaggatggtctcgatctcctaacctcatgatccgcctgcctcggcctcccaaggtgctgggattacaggcatgagccactgcgcctggcctccccacagtattttattatgaaagttttcagacatgcataactttggaagactaacacaagggtcagcagactacagtccatgggtccaattcagcccactgtctgcttttgcaagtaaagttattggaacacagctatgcctgtttgcttctctagttctggttctatggttgttttcagtgccacgcaagcagagttcagtagttaggtttgcaaagctgaaaataattactgtctggcaatgtatagaataagttttgctgacttctagcatagtgcagtgagcacctctatacttacaccccaggtcagtgattgttagtgtttgctatattagttttttatctttctataggtctgtctctatatacgttttattttttagctgaaaatcagttgcaggttttgtagtactttatcctgaggtccgtttaatgccagaatggtgagtttttggactacctgtatgaaagatttactgtgtgcatttttctgaggagagaccatcacaacacttcatcagatgctcatcgtctgtgatcgcagagatattcttcaactcctggaccggagaacccaactcacgcaagatcttagtcacttgtagacctcgtctcagttatgtagggcctcagaacagaacaggctaagggagctcctgctcctcaacctcgccctgtccctacctgttctgcctctatccaggaagaaaggtcccccgtgggaccattagtcactctccccctcatgaaagcatttcctcccactctcacactcatgagctcattccattcttgtgacagtgctgggagctattaataataggagaggcctcgtggtgatgaagaaatgaggggagagtttcacagtctgtcctgccatcagagcagctggctttggatcccacactccctcggtgcttgctttggtaggtgtctttacctctctgatcgtcactttccaaagtggtgaaaagaggatattagccatgcttttcttttaggatctggaggatcaaatgaggtcccaacatgtaaatgcttgttgtgagatctattatgtgtgttagccaaatataatagttctctaggactgccacagcaaatcaccatgaactgggtagcttaacacaacgaatttattctctcacagttctggaggccggaagtctgaaatcaaggtctcggcagggttggttccttttggaggctctgagggagacccattccatgcctctctggaagttaggacttctggtggctccagcaattccttgtgttcctgggcttgtggatgcatctcctggtctctccacccatcttcacatgcgtgccttcccctctgtatctgtcttcctttctgtctcttagaaggacactgtcactggattcaaggctaaccctccgtttaggatgatattatctggacacacttaactacgtctgcaaagactgttttgacgtgcacgtcactggattcaaggctaaccctccgtttagggtgatattatctggacacacttaactacgtctgcaaagactgttttgatgtgcacgtcactggattcaaggctaaccctccgtttaggatgatattatctggacacacttaactacgtctgcaaagaccgttttgacgtgcacgtcactggattcaaggctaaccctccgtttaggatgatattatctggacacacttaactacgcctgcaaagactgttttgacgtgcacgtcactgggacataactttttgaggctgctattcagcctcctgtactggtggtattattactactgctaatgctactcttgtttttgtagtcattttattacaataatttttttttctctttgagacaaagagtctcactctgttgcccaggctggagtgttgtttgttcttttacaatcacttagccagcaatcctggctttaaatcctgctccatgtgatcttagctgtctgaccctgagaggggcttttgttccccgagcctgtttccctgtctgtaaaatgggactccagctagtgacatgggtgcaggtgtgtggatgtgtttagccgaggaccgggcacagaggaagcgtgttataaacgtggctgctgctgttaaagtacagtgcattggcatgttacatgatactgtgtataggagaaagtgatgaagagagaggaggagagggagtacagttttcaacagagtggtcctggaaagtgcaactgagtaggtgtcaccttcataagacccaagggatgcttttgcatttgttgctgctgccactactattgttgttatttaatgattccctcgaggtcacagggtctcttggtgggtgtttgccaaattactcttgagcatcttcacatgtaaccaagcaaggcttccaggggctgactgggttgagagctgtcagaactcacgcgtgtctgggatttctaacattctcccctcctcttcttgttctctcattagcttcgcctcaacagcatcaagaagctgtccaccatcgccttggcccttggggttgaaaggacccgaagtgagcttctgcctttccttacaggtaacaaaggggacccctggggcccagatgtggggactcttgggaggtggttttcactatataagagaagacttgtggatttaacatattgtttgtgaatatctgccctgtgttagacactatggagtgggaaaagggattcagagaagtgcagtcttgctctaaaagaatggtctggaatgatggagacagatggtgaaagggatctagaagcaggtagaacgaggtttgagttgcagctccaacagttggaagctggtgactttagacaagttagtttacctgtttcttatatttttcatctgtagattgggataatcatccatgtgccaaagtgttgatctgagcattcaatgttaataacaattgctaatacttatgatatgcttactgtatgccaggtggtgttctacaccgtatcttgtgaggattgagttcatataaagtgtttagaaagctgcctgtactcagtaaacatacatcactatcatttcacccagttgatctcacagcagtgctttaagcaggtaatactgctgtccccatgttatagatgaagaaaccaaggtgtagagaggtgaagtgattcatttgcccaaggtcatgcagtgaggaggtaactgagaagggatatttatctagtcattctggcctttaacttgacagcattggttaatgactgatttcaaatctgagctctaccactttctaggtgtgtgactttgggcaagatattttacatctgcctgcttcagattcttcacaggtgaaatgggcataattatgtaacctaacatgaagactaaataagatactgtaaagtgcttataacactgtatagtacgtgccgcctaagcgatagctgccaggctgttactaagcactgctgtttgtgaggatgtaggtaaagcatttaatacactgtctgacacagactggaccacaattaatagtaaattctctgttatcattattcccattactacttcatattttatacttattaccagctgaaatcacagctgaaggttcagagtgctttgtcactaaactcttgtgtatgggaacatcttacttggacctagtgatgatcctggggaggaaggagcttgagattgttacccctccccacactggacagatggggtattggagcctaaagaggtgcagtgactcgcctacagtggcacagctagtgactgaggggtgcaggtgtgtctgactggatggtgcatgaagagtaggtgtctgctcgtatgacactgaacaaatggccccaaaccaggtggcttctattggtgaactgttggggagacttgaaagctttagaatgctgaagcatggcaggataataaagtggtgaagaagttgtagaggaaaaatgttggacctgggtttgcaataagcagctctgccactgacttgctaggaaaacctgagtaggtcactccacctctcttagcctcatttcccttgtctgtaaaggagtctaataagaggagtacctaacactcggggtgtgtagggaaaactctgtgactttcctctactttcacaccacagcaatcataacacagaacatgacttctgtgaccatatgtctgggtttttttccccaaactaagcagtggacagcagctggttgtcctctaattcagttctgacacgtctgcccagagacaggttcagatcccacagattgatagctcagtccccaggactgtccccagccctgaccaccagtcgctggtcctgtggaacttctgattgatcagcttcaagttgggattcccacgaccccctctttgggtttgattaggctcatagaactcagggaaacacttatgtttactggtttattataaaggattttgcaaaggatacagatgaagagatacagagaatgaggtgtgggggaaagggcctggagcttccgtgccctccctgagcccaccaccctcaagaacctctatgtgtttcaccatctggaagctctctgaaccctctgggtttttatggaagcttaatggcagagggtcctgagtggaacggaggcaccagccatgtggaactctgtgggaagagcatttcaggctgtggggagaggcagatgtaagctcagtgtgttggaagaatagcagtgaggtagccatgggttgagcaagattgttaagggagagtgagactaggacatgaggttggagaagaacagtgaccacagtatgtgagatcaggtttctttgaaactattggcagattgaaatgaaagagtgtcgggatttcttttacacctgaaagagtcactctggggtctgggagatcagatggtgtaggggcaaaggtggaagcaggaaaaccaggtaagaagctgttgcagtctcccaggcgacagctagtgatgatcagagtgaccttagtttgggagggttgacaggcttggctcagaaggagctgccaacccttccaagaaggatagttctctgtggattggtggaaagacaaggtgctggcagttcccaggtgtttggccttcagcagcattgcttggctataaggtctagactggagataaagatgaataagaattgagtccgtggatacgcataaggtcttcaggagacaaagaaaacagggagggtggttttaactgtgtgcagagggagccagggaaactgaggctgggaacgagcctaagaacagtgtagctggagtcacattggcgagaatttatttattgaaggaagaggcagagatactaaccctcctactgggccctgtgctgagctcttcaatgaaagcatttatttccctttagtctccgaacaaccctatgaagtgagaacagccctgtggtgatttaggggatgacaaaggctcagagagatgaagtgagctgctgtataagcagccaacagtaaagcaagatttgaacctaccataaaatggagatgatgataatgactccttaaatgagagggttgtggtaaggaggtgatgcagaagttgaacccaccacttacactcacacccctttggccagagcaaggttacgtggccttgccaactgcaagggcgtctgggaaatgcagtcggctgctggattgccatacacccaacttaaatgcaggaggtttaagtgccaatagatgccagggatattagcagcttgtgctgtgcagagatcagcagttcccactgcctcagggatgagaggatggagcttaagagagaggcctttggatgtgggcattagggacagaacggattttcccttcacatattcattctttcagcaaacctgaattgctgtctgtctgtgctcagctctggcaggaactggggcacagagaggagccagtcctgggctcgctgattatagcctatgttaaggatgtggtaaaggtggcatggaaggagagagagactgagcccagagaaggtgtagcggacatcctagaaatcttccaagaaggggcggctaaactgaatctccaaggataaaaataaatttctggcagagggaacagtgctgaggggagaagctggaccccaaaaaagctctcgttgaccatgctctgcgctttatacacctagtcatatttgctcctcactgtaaccgttgctacgagggagggatggtgaacaccattttacagacgcagaagctgggactcagagaggtggaatcactcagtcagtatttcacacccgctagagggcagaagcaggacttagggctctcttatcccagccaagcctgtaccttaatatctgtggcagcccaggtggagagtgggggagcaagtgggcggatggaagaactgagtgctgacagcctgaggaagcagaatggagtccatgtgttctgagcttgggctggggtcagagttgagatgggatagtcacgaagtctgtcttggttccacagataccatctatgatgaagatgaggtcctcctggccctggcagaacagctgggaaccttcactaccctggtgggaggcccagagtacgtgcactgcctgctggtgagtggaaggcaggaagtcctcttgcccaccccttagggtcggcccatggtcctgccggcctagggcagggaggggagcgtgtcagagagcgtggggatcacgtcagaacagccgggccatggacatccgctttaatccaacaagtcaggagtggcttttaatatcgtgaactcagggtgcagttatcatcctttctgtttagtggtcaggtaggtgcccagtgccaggccttacctgggattctacatagggctgtgggtttagagtcaggttgggttctactgcttatttgctgtgtgacttgtaagagaattacttaccctctctgtgctgtacctttctcatctgcacaatggggttatgaaaacctttttaaattaccttgaagagccctagcacagtacttggcacttagtaggtactaaccgatgttaactgcaattgtcattattgttgctgtgacatcatatccagcctttggggtaggagggattccctgtttatgggtgagccacctggagcactgagaggttaagcgtctcttcagattgtatgactagtagatggcagagctgggattcttggtctgtccatttgactgtctgccaggtccccaccccactgcctgcctgtgtgtcccgtgctaggtgatggccaaggacacaaagatgggccagatcccaacaagcagcgttgtttgagagaagatgatctgggaaggcagaccgtacaggttacctagtcccctggttttcactgttctcagagtgctgggccactgctgctgcctctgcctctgccccactcccccagtgattgtgtatttcactgtcgctagagatacaatgtggcaccggcagttgatggtgtattagttagcagcagcctttctcctagctctagtggtgtataaagaatggtgcttatcattgttgggatcttgggatttgagtaaatataacaatttgtttcttcccaaatagcattatgtaaagaaacttgatagttaccattaaattcggatatctcagccttcatctgggcatatgtgtataatttgtgcgtatggacacacagaaaattgtatacaaatagatcgtttcatacattttacacaaaacagggcttaacatgagcatgatgaggtttgggggccagcctagaaggggttccttgaatttcacaaaattatctgtagcccctgcctggtatttgtcaggtggaacttctgagcagtgaattcatagctttcagtagcttctcagaggacttaggagcagaagacattatttttatgaaaccgcaaggcttcaacaagggcccccagggtctgcaactgaggttgggactcaggcttgctgtggagctgggctgggacccagggatccttctcctacctggccagggtctcccaacagaacattctcagtgaggaaagtcccagtcaagccacgcttccttttgggaagcagttccctgtgaccgatgtgcctgacgttcatgtcagccagcagacacatcctggggctgtctgggccaggcagtgctggaaaccagagaagagttagatcagaatagcttgtgcttgctcgttgcctgcagtgcacatcccaagagccttacacagttgtatactgatgttagctgtattgcccagatgaggaaactgaggcacaggcagatttaagtgaattgtccgagctgggaagaggcagagtccagattcgatcccaggcccctaattcttagccactcctatgtgctatcctcagagggctcctggttgctttcagagctgtaaacaagggaggcaggggggtccttaaacccagggaaggcgcctaacctgcttaggtgggatgggaagttgtcagggaaggcttcctggaggaggtggctgttaacctggattttgacaggttataagaaatagaaaatggctttgtgtagtttcttcattccacaaacattgagcaaggtctctaggctatggaaacccagagatgtgtcagacccactcccggcccttgctctcagcagtggtgaaatggaattaattacagagactcctgtagctgcagtgtaaggattgtttttttgtttgttttgtttttttcccgagatggagtttcactcttgctgcacaggctggagtgcagtggcgggatctcggctcactgcaacctctgcctcccaggttcaggtgattctcctgcctcagcctcacgagtagctgagattacaggcgtgtgccaccgcacccagctaatttttgcatttttagtagagacggggtttcactttgttggtcagattagtctcggaatcctgacctcaggtgatccacccaccccggcctcccaaagtgctaggattacaggtgtgagccaccgtgcctgggtgtgagggttgtttctgtgtcagcagctctttttatttttatttttctttgagacagagtctcgctctgtcacccaggctggagtgcagtgttgtaatctcagctcactgcagcctctgcctcccgggttcaagtgattctcaagcctcagcctcccaagtagctgggattacaggcacccatcaccatgcctggctaatttttgtattttttgtagagacagggtttcaccatgttggccaggctggtctagaactcctggcctcaaatgatcacctgccttggcctcccaaagttctgggattacaggcgtgagccaccgcatccggccagcagttcctaactcttttggaattatggatccctttgagaatctgttaaattctggaccctcttcttataaaagtacacaggattttaggcggttcacactcttccctaccctgtgtggtctccaggtttgagaacccttgcccccagacttcacagagaggcttcacagtagtgagtcttcactgtgcaaaggcatcaattgcagtttcttaaatgtgtaccttcctgggccctgcctccagatattctgattgttttggtccatgctgggataggcctccgggtgattctgctgcagggtggtcagggatcatcctttgagaactacttcctgcagtaacctacaggagaagagaaccttggcttacataattactgctcagcctctgtcccaggcctccttataacagattgccgtaagttccaccggtagtcacttggcaagtgttgattgagtaccttctctgtgccagcccaggtggtgggagaactgaggtgaacaagaggaactctgtccctgcagtatcccagtcacaccgcacctatggtcacactcccatgatactgtcctgaacttgagacgtcacgatagcatgaggacctgtgacagtgacattatgctggcttgcttagtattacatttttcctttgaatcattcattgcaactatttttaaatgctatttttaaacatttgtttttattcttagttttactgtaaaaatatacatagaatgtgctattttaattattttaaagtgtgtagctctgtggcggtaggtttattcacattgtgcagccattatcaccctccatctccagaatttttcacctcctcaaactgaaattccaaacccattggacatgagctcccccttccctctcccccagcccctggcagccaccgtaggagtttgactgttctagattcctcatataagtggaatcagaaaatatttgtctttatgactattagctaatttcccttggcataacatcttcaaggttcatccatgttgtagcatgtgttacatgagacttctcacatacaagattcttgagtttttttgagggctgcatttggaaaaccagatttgcttattgccagctgcattctcccatagtgacagtccttggagctggggagcacctgccctccctgggctacatgccctccagggtgccacagtgcctgcctcttcctattcatgcctcctgccacccctgcctgtcaccttggctgatggcatcattctgttacttgactgagccctggaggcatttccatttatgattttttttttcctgctttaaatacctgtcagcccaagttgaatttcagatcagagacctccacacctttatttgaacatattgggataagttgagtctcccttcagtaggtcactaattaagagttcctgtcttgtgctaagagtgctgctgggctctggggatacagtggagagccagtcgtatgtatctgaaggagcacagtcattctaggcccacagtaacaaccagcgagcagtcccgagccccatagtcccccagaaacatgagatcccaattcagtcaccagagctgtgtgtaactgttcatgggaagcttaggtcaggttttcgatcctgacctgtagctattactagcttgggcaagccaggctgtacctcagttttctcttcttttttttttttttttttttctttttgagacggagtctcgctgtgttgcccaggctggagtgcagtggtgcgatctcggcttactgcagcctctgcctcccgggttcaaggattcttctgcctcagcctcccgagtagctgggattacaggtgcgcaccaccacacccagctaatttttttgtatttttagtagaaacggggtttcaccatattggccaggctggtcttgaactcctgacctcgtgatccacccgcttcagcctcccatagtgctgggattacaggcgtgagccactgcgcccggcccgttttctcttctttaaaatcaggacttgctttatagaattcagtgaggaagaacaagcacccctggtacaacacggaggtcctgcctagtacacacagtgagtagatgttctacacagtgtcagtgatgatcattgcactttgagaggctaagaactttctcctcagaaagcaacgtgtgtaattttaaggtttatggaccccagtgaaactccttcaaggacccctaaataagaacctttgtggaaggcacgctgacagagaccttctgctggctggcataatattacgtttttcctttgagtcattcattgcaaccatttttaaaggctattttaatgaaggtcgggatgggtaatagggaagttttctctgaggagatgagcccatgatggggtgcaggatggggctccagggctgcggatggtggagagggagctgtccagtgactttgtgttctcaccacagccaccgctggagtcgctggccacagtggaggagacagtggtgcgggacaaggcagtggagtccttacgggccatctcacacgagcactcgccctctgacctggaggcgcactttgtgccgctagtgaagcggctggcgggcggcgactggttcacctcccgcacctcggcctgcggcctcttctccgtctgctacccccgagtgtccagtgctgtgaaggcggaacttcgacagtgagtctctgcctccttggaagctccaagctcccatctcagctccaaccttctctaaagcctcagactccttttggtctagctggggcccaaatgcccctgaactctctccactcccactcctgcttaccacctgataggccacatcctcgagagttggtctctggacacggccacgtgtcagtttacccacctctgcccccttgctcacttaggaattgagatgatgacaggtcctccttcccactggttaatgtgaggatttaaaagaattatcacacataaagtgcttagagcaaaatctggaacataaaaactttcagcaacttacatctgatggtatctccagcctgtcccaggtccagtgcctttggcagataaaccacctcagttttcagcctcctgctcgtctactttgcaaacgattgaccgtcaagcccgggtttgagcctgactcactccagaactctggtttatggctgtacacttgcttagatacttacactggcccccaccgcctttgatcgaagcaattgctgctgaaaaataaagcctttctgtggctctagacctgcctcttagttaagcagttttttgtttgtttgttttttgagataggatctcgctctgtcatccaggctgaagtgcactggtgcagtcatagcccactgcagcctcaacctcctgggctcaagcattcctcctgccttagcctctcaaatagctgggaccacaggtgtgcaacaccacgctgggctcattttttatttttggcagagatggggtctcactatgttgctcaggctggtcttgaactcctgggctcaagcaatcctcctgccttggtcttccaaagtgttcagattacaggtatgagccactgtgcctggctcgttggttaagcaatttttatgggaatgatgtaatcgtcagcacttagcattgactagatttattatgcgcaatctgcgaagtgtctcacacacactattttcatttaaacctcatgcggacctgtggggtaggtactgttactatcagctccgtttcatagggctgggaagacagagagggggtcatcacttgcccaaggtcattcagctaaaacctggacccacacaactgcagagtctgtgcttgctcctctctgccatactgcctgctgcctcaggatccccgtccccgactcccaggtacttccggaacctgtgctcagatgacacccccatggtgcggcgggccgcagcctccaagctgggggagtttgccaaggtgctggagctggacaacgtcaagagtgagatcatccccatgttctccaacctggcctctgacgagcaggtgagttttgcttcctggccctctgctctcccgtccttctggtggttcctgcccatgaaagagaatcccagagctcagcaaggcctctgctgccctcccactgttcctctcctctccctaggactcggtgcggctgctggcggtggaggcgtgcgtgaacatcgcccagcttctgccccaggaggatctggaggccctggtgatgcccactctgcgccaggccgctgaagacaagtcctggcgcgtccgctacatggtggctgacaagttcacagaggtagatgagcgaccgttgacattgtcccactggtggggacactgacactctcagaagggaagcatataggagctgaggtttccattaggccgatggaaccattgggcgtttgagcaataagatctctatgatcatctaactgcgtctcgcttcgtgtgccaatcctggttgattgacatggcatcttaaagtgctgccttgagaaagattctgaggcaaagttaaggctacgtggaggaaagtgccacaggagcagagaagggtagcacatgtggggtgttcctgacataatcaagctgtcctttcacaaaggggaagacagcccaaaaaggtggggttttttggtgttttttttttttttttttttttttttttttaagatggagtctgtcgcccaggctagagtcttgttacccagctggagtgtggtggcgcaatcttggctcactgcagcctgtccctcccgggtgcaggcatttctcctgcctcagcctcctgagggactgggattacagatgcccaccacgacacccggctagtttttgtatttttattagagacggggtttcaccatgttgttagccaggctagtctcgaactcctgacctcaagcgatccgcctgccttcatctcccaaagtgctgggattacaggtgttagccaccgcgcccagccccggaaagtttaattaactgatcagagtgacactaccagccaggcagaaaggggacaagactccaggtctgtgactctcaggacagtgctccttccacagggatccagattgcctcatcccacaaacatgtttgctgagcaccagctatttgctgggccagtgaattcggatcattcctggccttcatggagctaggcagtctgaaggggaagactgacttaggggaaatttgattataaagtgtcacaggtgtgggacagacagacagatgtggggccttggaagcattgaggaggggaggtggtgttacagctggttctagaagatgagtgggtaagagctaagataggaactttgttccagccagaggacaaagaaccctgggaggtgagagcaagtgcaagcaggaacattcaggcctgatcttgatggcccagcctgagagaaagcaggagagagggcagggtgggatcggagagagggcagggtgggatcagagaggccttgagtgccactccaccctgaggcgccctttgcctttaattatgctggttcccactggcatttgcgggaaggactcagagcttcagaatagcgtaccatcaccacagttagggaaggttcttcccatccttgtctcctgagctgcataaactgtgtcacactgggtcttagaataaaaattccatgagggcaggaattttaggctgttaaaccagttcttggcacatagtagacattcagtaaatatttgcaagatgaataaaaggcagtattttcccaagatatcatgaggtccttcaagatttttacttgttcattcccgtcttcataatgaactgtcctgcttcctaccaggtcttcaggaaccagctttgcagcaggagccgtgcgtctttccatgcctggtgccatgaaacaggcagggccaagcgtgcctccctttttttttttttttaagacagagtctcagtcttttgcccaggctggagtacggtggcacaagctcagctgactgcaacctccacctcccagactcaagtgattctcgtgccttagcctcctgagtagctggaattacaggtgtgcaccaccacacccagctaattttgtatttttagtagagatggggtttcaccatgttggccaggctggtctcgaattcctggcctcaagtgatccacccacctctgtctcccaaagcgctgggattacaggtgtaagccactacgcccagccctagagtgccttcctttctgtcaatctttattgttttatttttattttgagacagggtctcacaccatcacccaggctggagtgcagtggcacagtcacggctcactgcagccttgacctcctgggctcaggtgatcctcccacttcagccttctgagtagctaggacgataggtgcctgcccccacacccggctaattgttttgttttttttgtagagtcagggtttcactgtgttgcccgggctggtcttgttctctgggactcaagcgatctgtccacctcagcttcccaaagtgctgggattataggcatgagccatcgcacttggcctattgttttattttcattacaaaagtaattcgtgcttctggtaacagatctttaagaaatacagccatatataaatcaaaaagttgcagtcactatatcatttgaatgtttttgaatcaggtaacagaaaacttaacctcagtagcctgaataatatggaaatgtgttatttttaatgctgacaacaccgtgaggtaggtgccctcgcagtcctcatttttctttggaagcaaaagaggctcagcgaggtgaagagccttgccccggggccagtcttggcactcgaattagattttagcactgcttccaaggcccacgctctgtcccctaattctggtgccttcactttgattttggcttccttagcccagagtaaactgccagcccctctcactctccccctcctccttcctgtctgcagctccagaaagcagtggggcctgagatcaccaagacagacctggtccctgccttccagaacctgatgaaagactgtgaggccgaggtgagggccgcagcctcccacaaggtcaaaggttggtgctggcagccggaacacagcaagtggggtgggtatccaaggggctggaggtggaactagcacatcaggtctcacttccctttgcctccctctccctgcccacagagttctgtgaaaacctctcagctgactgtcgggagaatgtgatcatgtcccagatcttgccctgcatcaaggtaacagagagtttgatgggaggaaccaagtggatccgagcctgccaaaaagaggggctggagacaaggctttggggatagtcagctgcaaactaggttcccagccctctgggaccaggcagctcttgggtttcaagcagttaggggtcctgactgcagcttgaggctgaccttaaaggtggaagtactttctagaacctcagatgtcactgagtcctgtcattcacagggttttggggttggagtgggggctgctgagagcaggggtcattgaactcttaagtaggtggtactcataaggaatagtgatttcccctgtaccctaagccatcccctgctctatgaatgagaggggcagaagcaggttattgtctcttaggagttggcatctgcttagccacttgctgctgcaggggttgcactgacccctgtgcctgcctcttctctctcccaggagctggtgtccgatgccaaccaacatgtcaagtctgccctggcctcagtcatcatgggtctctctcccatcttgggcaaagacaacaccatcgagcacctcttgcccctcttcctggctcagctgaaggatgaggtaagggcaccaggatctcagctctgggtttgtggaggggacaggcgggtcttcctagattgctagggtttacctagattgaccaggaatctgctgatatctcaacagacatccagatctttgctgagttgcatgtttgtgggcatagctgtgtgttcatgcgttcattcctccaggcactcttcatgaggcctttcctggacatggaggatatgaaaaatagaaatttaaagtttttatttatggccaggcgcggtggctcacgcctgtaatcccagcactttgggaggctgaggcgggtggatcacctgaggtcaggagttcgagaccagcctggccaacatgatgaaacctcgtgtctgctaaaaatgcaaaaattagccaggcatggtggcgagtgcctgtaatctcagctactcgggcagctaaggcaggagtatcacttgaactcaggaggcagaggttgcaatgagccaagattgcaccactgcactccagcctggacaacagagcaagactctgtctcaaaaaaaaaattatttatttatgttttgagatagggtcttgctctattgcccacactgcagtgcagtgatgtgatcatggtctactgcagcctccaccttccaggctcaagtgatcctcccaccttagcctcccaagtagctgggactacaggcaagagccaccacatctagataattttaaaaaacattttccatagagacaagatattatgttgcccaggttggtcttgaactcctgatctcaagcagtccttttgccttggcctccaaaggcctgggattataggcgtgagccgctgcccccagcctagaataagagttttgatccccaaaagccttcagagactggcagtggagagagacaggcagtcccatgatgccattaaggtgttacaggtgctgttaaggatgagttcatgttttttagggtttaggctaaggtgctctaatatagaccccagaatacattctggcttaaattcggtggtggattttttttctctctctcataacagtctaggacgagattcctcacatgtgcttgcaccccatacacccattggccaggagggtcacgtgaccacacccagcagttcaggttgcctgtattacaaaggatgagaggcggtgctgggtgatgactggagagatcatcagggtgaccactggggaaggagtttggacttgactgtgggcaagcggaagagccagaatagagttggtgttagaaggcaccctgaggcttatgtgaaggaaggattgaagtgaggtggccagcagcagtgtaggcagaccaaaccggaggctgtgggagtctggaaggctgaggctagactaagtggtatgtagagatgaggctgcattgatacggaaggattcaagattgttcaggaggcagaagggaccacgtggtggtttttgccttggtggtgaaaaactgggcagatggtgcaattgtgtgctggtgtgtgacatctttcccaaaagatgggaagtgtgtgaggcttcccaaaagcctcagtctttcttccccatccccttctttcttttttatacacaggcgcccacacagtctgctagaaagttggaggaaatactgtaacagaaagtactgcatcacatttcagtcctccatgcccctaaaagttacgttattcaattctgttacagtggagtaatctcttagccccagaattacagtgaattttttaatacattgaaaagagtgcgctatttttaatatttttttgttctttttgtttttccctattagtgggtgattaactgtactggttttaatcagttaattacgtcagttgctaaaagtctgaatcttcattagtgttcatgacaaattttatgacttaagtaatttatctgagttatgcttcacatgcacatagtttttataattttatagatattaatacaatttatatttgtttttgatgctttaatgggcataatttggcaggtgagagcccctcaagttgtctgctatgtcatttcacacctctccagcgttttggggatcattttgcctctggcatgagggaaggatccaggctcagcccagtttgaaggcaagcccatacgtgctgcaagtgcgctaggactggagcattttttgctccagtttcaccttcagcaagcgctatatggtaatcgtgtgctggcagccagcctgtctcagggcagcttctcttagaagaaaagaaccagcatggttttcttggtgtgaggaattcatctgacttatatttgagatttccattttagatttataaactttatattttacattttgactctcaccagaatttataaacttgtctaaatgaaaaaggctacctttttactggtgcaccaaaaataagtctttttaaatgggtgaggtatagtctctgagccttctcttctcatgcacatgttcagcagcttgaggctcacacagcaagggctggagctgggcaagggccagtcctatcctcggaatgtgcagggtttcaacagcccaagcctgccaggcttgttcacttggttattgattcatttcagtgctcctttatttatttatttttttagactaaaatagttttaataaggaaatagttttcttccttcccttctcccatgttgtggattgatacccagaaaggaacccttgttagcaagcagcggagctaggattagaagaatcatgtctgcctgttttttccagggtgctgtattttcctactgtgattcttaaagtcttttcaaaatggataaacatttcttgtgatactattgtaaggtttaaaaatctgcttaagttagtgatccatgctgcttgctttttgtgtgccgttaatgtgttcccagaacggggagctgggcttggacaggagtagtccctcgggagatgtccataaaagttgatgcagctgagctctttccatcctgtcctgggttgctgtgtgcattgcattctctcagaatccttctttcctctcctcagtgccctgaggtacggctgaacatcatctctaacctggactgtgtgaacgaggtgattggcatccggcagctgtcccagtccctgctccctgccattgtggagctggctgaggacgccaagtggcgggtgcggctggccatcattgagtacatgcccctcctggctggacagctggtgagtgaggaggcctgggggccaggcagtgctgcctcaggggaggtgcagtatgtccagggctgtgatggggaaacggggctttgaaggcttagtggaggctgtgacaactgcctggggagtcgaaggaagggacccaggaaatagggccttaaaagatgcattggattcaataagagagaggagggaaaggagcacctcagacaaagttgagaagtgtccggtctttctagggtgggtgtaggttccatgggatgtggctagcagctccccctgtttgctctcctggaacgcttaccttggaacccttggtttctcctgtagggagtggagttctttgatgagaaacttaactccttgtgcatggcctggcttgtggatcatggtgagtaccttcacaggagcagcaagaggagatgggagctccagaaaggcaggatggattggctggggctgtggcgggcagtggaggaggctagagtcactccccacgccgctggatgctcgtatggaccagctcgcatgcttgttagagtcctagagaagtgttgagtgggaggaggacgaaacagatcacccaggggttgcctggtatagtggagagccagagggccactgagcagccagaccagggttttgaatcctgcccttggggctgtcagatctaaaacaagtcacctgctgtctttgaatgagccccacactcattctttgaaacttcttattctggtgccttggggccattatgagaatggctcattgtttacactaagagaggtaaaaaataaaaggtaatatttatctctgtgaagccctgtttgaagtaataagtgccacataatttaggcaaatcacttcttagagccttagtttgcccatctgtaaaatgaagccagtagtggaacctacctcttggagtggttgaaaagatactgtataaaaaaaaacagttactagatatagcacatagtaagtccttttttctctctttggctcacatgcagcctggcacctaggggctgctttgtaagccatggtgagtgtgacctacattttgcccacatcagttcttcacctccaaatccctgtctctctcaccctcacccttctgcagtatatgccatccgcgaggcagccaccagcaacctgaagaagctagtggaaaagtttgggaaggagtgggcccatgccacaatcatccccaaggtcttggccatgtccggagaccccaactacctgcaccgcatgactacgctcttctgcatcaatgtgagccttccacctgcctgctggcccatccctagggaactggagcgcgtgggagaggagggatgctagagggttccccaagggagacacctggcttgggaatggagacatggagtgcatcttctatccagagatgagtccttggggaactgcaggcaagggggtggggctcccagggtcagggtcatagggcctctgggactggggacttggatggtgagggacccagggcctgggagacttgacctgttggagcagcgatctcaagctttatgagcacccctctccttccctgagaaatgtgtgtctctatctgtggtgcgttgggtgagtgtatgggctctaggtcagacctagttttaaattctggtactgccatatattagctatggaccttggatagttacctaaccgatgctttggtcttctcatttgtaaataattcatactgtaaagaattcatactggtaatcacagcctggtgagcgtgaagattaatcaggttatacacgcacagggcttagaacagttatgctacaggtaggaagtgctcctgtctatttgcttttcctacgattataattatctcatgtactacttatttatgtgtaaaccatacacagggctagaaaggaagggatttaaaaataaatataactaagtgttctgatcatttcttcccacgccactctctggagagcattgctttaaggagggatcctagggcttggtaattaaggtcgatctccagaataattaagggaagcctgaggacagagaaactgggacatggtgttaggatggtgttagtggagttgggagattcactccactaactgagtcacccgtattgctcagcctctgtggggcctgatgatcaccagagtggcctggtcagaggcagcaggaaatgagagttagccaggagctttgcatactcacccctgccactcactggcccccaggtgctgtctgaggtctgtgggcaggacatcaccaccaagcacatgctacccacggttctgcgcatggctggggacccggttgccaatgtccgcttcaatgtggccaagtctctgcagaagatagggcccatcctggacaacaggtgaggtctggatactcccccacacactggcaggggcttcttgtgggcaccttaatctttgacctttgaaggtagagcccagggtcagaggcctggcagcgctccttgcttgctgtgtgaccttggctcccttcccttctcaaggtgtgttttctcaactgtaaaatgaacatcacagcatgaaatagaaagagggggtgatgggttggcagtcctgtatactagcaacaagtcattagaaaatgaaatcaccttatgttttatatgtaagtatgtgtataatttataattgcaccaaaaatatcaaatagccaggaataaattcaatgaaagatgtgtatgtaacacctctaatgtaaactgtaaaacactaatgtgagaaattaaagcagacctgaccaaggtgggcggatcagttgaggtcaggagttcacgaccagcctggccaacatggcgaaaccccgtctctagtaaaaatacaaaaaattagccggtgcggtagcactcacctgtaatcctagctatttgggaggctgaaggcaagagaattgcttgaatccaggaggtggaggttgcagtgagctgagatcatgccactgcactccagcctgggcgatagagcgagactgtctcaaaaaaaattaaagcagacctacataatattcacggatgggacagttccctgaactcatctttagattcagtataagcccaataatcttaacaggttctttagtggaaaattgacacttctaatgaacaaagttgtctgatttacactaccagagacgaagacttatgacaccacaataattaaaatagatgtgaacacaagcatatttaaatcgcccaatagaatggaatcaagggtacagaaacagtcccacatgtgtttaacagtaggcatctctgcagttcagtggagaaatgtatgttttttaaaaaacatagctgagtcaatttgatatccatttaggaataaaagaaggctcgcctcaatgcataaacaaattaatttgagatgacagaccagaaccagaaagattttaaaaataaaggacctagaagaaaatgtaggaaaatatcttcttgagttagcgtaggcacagatttgttaaacagcaaaccagaggaagtgatgggtaagttgaccttctgtaaaatgtaacgctgtttctcaaaagacagcattttgagagtaaaatgcaagccactgactggaggaagatgttttaatatatgtttctgagaaaggactcatccacaatacctgtctacaaatcaggcaagacaagaaagagatggggaaaaagacttgaataggcacttgaaaaaggatctccaaatagccagtaagcatatgacaagggtgttcagcatcattagccttcaggaaaatgcaaattaaatctcagtgacatatgactacacgcctcccagaacagccaacattaaaaaagactcagtggtgcaaatggtgaagacatagaagagctggaactctcatccattgcacgtggggctgtacatttagggtttgatcactctgaaaacgggagtggatctggagtggaatttggtgaagcttgttatacaaacagcctgtgaaacagcccttccactcctgggtctctatccaggagaaatgagtgctgtttctgtcagaagaatgttcatggtagctttattcatagtagccgtaaaaatggaaacaacctccatgtctgtccacagtagagtagataaattttagttcattcaaacagtggaaaactattcagcagtgacgaaacaaatgcctgctataagcagcaacaggtgactctcacagataccatgttgagtgaggagccaaaatcaagaaaacacaccatttatgtcaagttcagaaacaggcagaatgaaggaatcgagatgatggaagtaagaatagtggttatttggggagaacagggaactgtcaactgaaagtgtgggacccacaactgcagatttctctttctgtctgttccaggacacaacctcagctttagtttctctccgaagtccccctccgttttccaaaacaattgactcttggtgcaggcggatttccctgggccccatagatgagagtggatgcctcctctgggctcctggaggaccaggaacttccccttggggccacttaccactcccctcttacgtaccagtttggtctcttcctcctggcccgggtgcctcatggcagaaatcaagagtgatttagctctgtattcactcctaatacattgtaggcctcagtgaatatgtgtgaaatcaatgaaagatacccatttgctgggcctcagagacttgggggttctgagattctgttccactttcccagcctgctctgatctccctgtttggggccccagtccttgtttatcatacttctgacctttaagtaattggttggttggttggttttttgcagtttgtttggttttcctttgaggcagaatctcgctctgtcgcccagactggagtacagtggtgcgatctcggctcactgcaacctctgcctcctgggttcaggcagttcttgtgcctcagcctttcaagtagctgggattacaagtgtgcaccaccatgcttggctaatttttgtactttgagtagagatgggggttttcccatgttgtccaggctggtcttgaactcctggcctcaagtggtctgcccaccttggcgtcccaaagtgctaggattacaggcttgagcccccgtgctcggccttgagtttacctttttttttttttttttttttttgagacggagtttcgctcttgttgcccaggctggagtgcaatgatgcaatcttggctcaccacaacctccgcctcccaggttccagcaattctcctgcctcagcctcccaagtagctgggatcacaggcgtgcaccaccacgccctgctaattttgtgtttttagtagggacagggtttctccatgttggtttggccaggctggtctcaaactcccaacctcagatgatccacccaccttggcctcccaaaatgctgggattacagatgtgagccaccacgtccggcctgattttacttttaattgactcataattttatatatttatgggggtatagtagtgtttcaataatgtgtgcaaatgtgtaatgatcaaattaggataattagcatatctatcaccttaaatgtttactgtttctttgtgatgagaacattcaaaatcttctcttatagctgttttgaaatatgcaaaatgttattattaactatggtcacccgcctgtgcagtgatcagagatttctaattcctgtgtgtgccctggattcttgagactcctcccaccttgggtttggtgtatccgtgtctgtgtacactctcttgcccaagagccctgtgcccacctgttgccccagtccatcctggctcaccctctctctccctgtctcctttcgctttccagcaccttgcagagtgaagtcaagcccatcctagagaagctgacccaggaccaggatgtggacgtcaaatactttgcccaggaggctctgactggtaagacctagaaagcacggagccctagcaggagggtggactttgaggacaggcactgggcctgtgggcagcagcttctgggagggggaggtaccttggcattgtgggcagagagagggctctggttctgattcttgcctgttcctgttttcctagttctgtctctcgcctgatgctggaagaggagcaaacactggcctctggtgtccaccctccaacccccacaagtccctctttggggagacactggggggcctttggctgtcactccctgtgcatggtctgaccccaggccccttcccccagcacggttcctcctctccccagcctgggaagatgtctcactgtccacctcccaacgggctaggggagcacggggttggacaggacagtgaccttgggaggaaggggctactccgcccacgtcagggagagatgtgagcatcccgggtcactggatcctgctgctgtaatgggaacccctcccccatttacttctccacctcccgtcctccccatcattggtttttttttgtgtgtcaactgtgccgtttttattttattccttttattttcccccttttcacagagaaataaaggtctagaagtagttggtcctctggccttagtcatcagcttggaggagggggcaccaccccagagccacaacatctgcgcttttctctggagaagatcttgttacaggacccattatacccctatgtcccgaaagaatactctggggatccccccaggagtgctgctggcctttggggtagagggtccatgaggtgctctgggtggtgtcctgtagtgcagttcagattcatagatgtcggccgagtatttggggggttaagagcaggtgccttggaaccagactgcctgggtccaaattgtggctccttcagttaatagacgtgtgactaggagtagcttgttaagtctttatgagctcagttttgtattgtgtaaaatgagagttacagtaatacctagattgcagggtgggtggcgaggaccaagtgaattagtacctggaaagtgtgtaacagtttcaacatgagaagtacacaacatgagaagcagagttagctgtacattgccagagaaccccctgtgggccatttcctgtgttcttgaagaagacttgggcttggaccctgtccccaggaggtctcagagtaatcaggacggtactagggagagaactgtggcaagatagatcagttatctcggtatctattctccccttcctaatgtagaagctctgatttttaactgggcagatgactacatggattcaaggtattttcctagtgtctcttgaaattaggtgtggtattgtgaccaaattctagccaaaaagatgttgaacagaagtggtatatgcagcttctaggaagtgttcttaagggggaaggcgtcatcccccacctttcctccttcctgcactctggaatgtggaccagatggctggagtaggagctgccacctggggccagaaaatgatcttaggcgtgaaggtcaagtaaggcaggacaagagagaaggagcctgcctccccgaggctgtgaagagccatgccagtactgtcacctgggagaattaaactggtcaagtgcctgttcgtttagggtttcatcacttgaaggtgaccggaattctaactgatggagggaggggcccagagcaccctggagaaaggagcaagggacgtatggctggtggtgtctgcatggaagggtttcacagaggaaatgatgcttgagcacattttgacccaggtggtggaagggaaatgtggctttgagtgacaaggtgatttcaccagctcagccttcatattaccacatccctaccctttgttagactttattgtgccctaggggatgaggctgaaggagaccaaaaagcatctttagaaatttccatttatgccctgggcgataaactctctcccagttgagaactactgctctagaaatgtgaacacacgtgtaaccaaacgtcaaagtctgacattaaactttgactttccccatggttaacgctgctggtccattgtaacaagagtgcagtggaccagcagcctttgcattctcaggagcttgttagaaatgcagagcctctcgtccctgccccgacctgctcaggcagagccttcattttaacaagatgcccaggttcatctgcacactgaagttagagaagtcctgccttaaatactaacccagtttttctctcttgagagtgaggttaatgctacgtgggtctagggctgaggatgtgctatggctcagaggtggggtctacaattggacatgtgtatgtagacaaggctcagggatatgttgaggctgctagattgggcaagtgatggaatgggattattacaggaggtggaggtgcgatggatacccaggatgtgctgggtaatgaggtgatactcagcgaccacaggagtgagtatgagagacgagggtgaaggatagcttgagttattgaacgctggcagagtcctgagttaaccaggagttgcctggtgtcttgggtcatgtgctctagaagcagagcccgagtggagactcgttcaagtgtgttactgagggagtgctctcaggagaacggactgaggtaactcaccttctgtgagcttcatgttggaagaatccaatcaggtgatgaatgtgatgttattaagtccattgttaggagtggttcctaatctcccaggctgcaggctttgtttgctccatacacctggccttctctgtagcagctgaagtttgatgctggagctgggtcagggtggagagactgtgtggagccaggactcatgaccctggcctgtttctcccgctctctaggcctaaatcccagcagtcacactggccatctctaatggttccttccacagcactgttcttcagagcccacacacaaattttgtctccttttgtgatgactgcacttctttggctgtttttgccaacagcctcttcactgaccccttccttccactgcattgacccagacatctggatgtggatgaggtcgagtcacttgttgcctttggctaatgcataggggcacgagtagagctctagaatcaccatgcccttgactcagggtgcagaatctgcctatggtgcttgagctgtggttgtcgctagaggagaattaccatggctcccccgggcagatgaagatgacgaggtggtgcctcagccccgaggagtgaactgcagggcaccgacaagattctgcctgtggccatcagggctggagggaaggaggccaggttcatctacccaagctggtggcatgaggcataaatttaaaaaaattggtgtgggcacagtggctcgcacctgtaatcccagcgctttgggaggccgaggtgggcggatcacctgaggccgggagttcgagaccatcctgaccaattcagtgaaaccctgtctttactaaaaatatgaaaaaattagctgggcgtggtggagggcgcctgtaatcccagctactcaggaggctgaggcgggaggattgcttgaacctgggaggcagaggttgcagtgagcctagattgggccattgcactccagccagggtgacagagcaagaccccatatgaaaaaaaataataattcaggaacttgtcaaaaagagaaaatccaataaagatttagtgccaggccttgactccagcaggccttccccgctctctcgatgtcttgccatacagagctgcaaggtggtggggggttacaggctttgtagggctggatttttcccagtcggcctccaggaagggtaagagactagtagctcgaagtttgggttggctgattgggtccttcccagacttcggaggagggaagggaaacctgaggccccaactcttcatggggaatcactgctctctgtccccaagagcacatgcctttcctgacagaagctgagtagcgggaatctgcttccacccaccccttagcttgggcttaggctcagtccccaccctgctgttcctgtaccctgtgcatattctagagcagtagggagaatgggccttccctgatgctgaaaataagaatgaggggctagaactccaatctcactctctaggcaaatggcagatgtttattattcatgaatactgttgagttaattcaggtctgtgttcctttgctgttactcctcttttttcgtatattttgtacagatactaagcttttattttattttattttttgagacggagttttgctcttgttgcccaggctggagtgcactggcactccacctcccaggttcaagcgattctcctgcctcagcctcacaagtagctgggattacaggcatgcgccaccacgcccgcctaattttctatttttagtagagacggggtttctccgtgttggtcatgctggtctcaaactcccgacctcagatcatccgcccgcctcagcctcccaaaatgctgggattacaggggtgagccaccgcacccagccatttttgtttactttttgagatggagtctcgctctgttgcccaggctggagggcagtggtgcaatctccactcactgtaacctccacctcctgggttgaagcgattctcctgcctcagcctcctgagtagctgttactcttaacatggataaaaatactttaaaaatttttcttttttgggaaactaaaagatatgcgattctcaattgattattcagtctgtggccttctactgaaggagcatacagaatctcacctccaggagcatggagctctcttggataggatcctgctttctgaggccagagcttactctcctatgtgatcagaggctttcacagcatccgcagtggtctccagatcagccctatcatggaggcttggtccagagatcttcatatgaaaagggaaataataagtgtctgggagacacttctgcagggatcctgccctgtctcaataatctcccccatggccacagaaataccctgggattttcccaggagctagccgacacacacagatagattatgaacttcagatagaagccccagcctagccctcactctgatacctgtcatccccaaactgctctgaagtgcttatgtgctggtatctcccaagagtctgcatgtcagtgtgtctgtgctagtgtaatttatttagaaaagtgcaaaggcaaagggcaggatcaacaggcaaagggcaggatcctggaggctggatctagggtcctcttacctgatttatgtcactgattttcccaaatattgataaaaatgaattgatctctaggtggcagagaaacaggaggaaccctagactacatagtaagtagaaaataatgctgcatgtcatttagattgagctcagccctgagtcatgaagtcttcagaacaaaggaatagttctcccttatctgatgctcactgtggccttgggcagcctggcatcgagaattctcagcatgttcactcttgagttctgtgcctgcatcacacagcaatggaacagtcccaaaagattcttaagggtggggaaaggcactaagaaaagatgaacctgcagtccctgttataccatctggtctaattgatactactgttgtcaagcaaaaggagctctctccctgaggcactggaagccaatattttgacaccaggtttttgagaaagaaaagttttttattgtaagttgactcacaagatgagtcaagctcaaatctgtctccctgtgctggttttaaggcagtaatttaattataaaacgtttaggaggtggattctggggttctcaggtgataggtagaaggaaaggagaggtctggaaagtcttcaggcatgcacagttctcttcatgtctcctcatgcatcatgcgcacatttagtgggagtttgaaacatggtgaggaaattcaggctgtgacatcagcatgcttggtctgtgcaaactccatttggccatattggtttcaaccaattttggccagttttgtagagggagtttgagcatttcagaaagttatttcttatctgctgttctgtaaattcataatctttgttagttactggtttatttaactctttgggcatgggttcactaccacctgtgctgaccccacttgatcttttgggcctccttacttcccaccttcattctctcatcatactttatatacactaataactcccctgctattctgtatgtaacccaaatatcagctgtactgcctcatctcttagatatctatgtatactctgacctaatcaaaaccagaaattgtggagtgtgaaatgagaaaagcaatagagaggtaacaacagtattgaacaagaagaaggaagaatttgtgaacttgaagataagttatttgaaaatacatgctcagaggagaagaaagaaaaaagaatataaaaaaataaagtcatcaggatgtacaggacagcatcaaaagagccaagttcacattacaggatttcaagaaagaaaggagaaagaaggctatagaaagcttatttaaagaaatagtagccaaaaatgtctatacctgggaaaagagataaatgtctaggtgtaggaagcttaaaggtctccaattagttttaattcaaataaaacttcagcaagacgtgttgtaataaactgtcaaaaatcaaagacaaaagcacaggggtttttgttttttgttgttttgagccagagtcttgctctgttacccagactggagtgcagtggcaccatcttggctcattgcaacctttgcctcctgggttcaagcgagtctcgtgcctcaggctcccaagtagctgggactacaggtgtgcaccaccgcacctggccaatttttatattttttagtagagacagggtttcaccatgttggccaggctggtcttgaactcctagcctcaagtgatctgcctgccttggcctcccaaagtgctgggattacaggcatgagccaccgcactcggcccaaagacagagttttaaaggcacaaaagaagagagactcatcatttacaatggaactctataaagctatcagcagacttctcagtaaaaactcttagaggccaggaggacagtaggttgatattattacattacagcagaaaaaaaccctggaagctaagaataatttacttagcaatctgtcctttacaaatgaaggacgttgtataaggactttcccatacaaacaaaagctaagcaagtatatcacttctaggcctgtcttacgaaaacgataaagggagtttttttttaatatgaaaaaaaggacattaagtagtaacgtggaaacgtgaaaggatagaactctctgataaaagtaaatgcagaatcaaatttcaggatactctaacactgtaatggaagtatgataatcacttatatattgagtataaagtctaaaaggcaaaactgttaaacataataggcatattaacttgtttagggatatacaatataaaagaagtctaacatcaaaaatataaaatgtgggtggaagaataaaagtgtagtgttttctatgtgatagaagttaactttatcaggttaaaatagccatttataagtaaaatatgttatatgcaagactcatgctaatcatgaagcaaaaaacctatagtaagtattcaaaagataaaaagcaagaaacctaaacataccagttcataaatgcatctaataacaaagacagcaagtgagtaggaagaaacaaagaatctagaaaacaatgaggaaataataaaatgaagagtaaggttttttttgttttttttttttgatacagagtttcactctgtcacccaggctggagtgcagtggtgcaatctcagctcactgtaacctccacttccccagttcaagcaattctgcctcagcctcctgagtagctgggactacaggtgcctgccaccacacccagctaatttttttgtatttttagtagagacggtgtttcaccatattggccaggctggtctcgaactcctgaccttgtgatctgcctgccttggcctcccaaagtgatgagattacaggcatgagccactgcgccccgccaggagtaagttcttaactatcaataattaccttgaatgaggccaggcgctgtggctcaagcctgtaatctgagcactttgggaggccaaggcgggtggatcacctgaggtcaggagttcgagatgagcctggccaacatggtgagaccctgtctctactaaaaataaaaaaaattagctgggcatggtggcgggcacttgtaatcccagctacttgggagggtgaggcagcataatcgcttgaacccaggaggcggaggttgcaagagcaaaactccatcaaataaataaataccttgaatgtaaatggattaagttatttaaagacacagaatatcataataattttttaaaagacccaagtatatgctgtgagaagagactaacttaaccattaagaacacagaaagtgaagaactagaaaaagatattctatgcaaatagaaaccaaaacagagtagaggttgaataaacattaaggaaaaactataatagtacaaaaattgtcattatacaatgataaagaggtgaattcatccagaggatataagaattgtaaatgtagatatgtgcaccatcagagaaccttaatatataaagcaaatattaatctgaagggagagacagattgcaatacaatactagtagggagcttaaatatcttactttccatagtggacagatcattcagacagaaaatcaataaggaatcgttggatgcaaactgcactttagaccaaatgtaccctaacagacatacacagaacattccatgaaacagtagtagagtatcattcttctcaggcatatggaacattctccggacagatcatatagataagacaaagcaaatcttatcaaatttaattgaaattatatcaagtattagttcctactacaatgggacaaaattagaaatcaataacggggaatttcaagatggagggatatgggaaaattaaaccacatgctcccaaacaatgggtcaaaaaagaaatcacaagagagattttaaagtatcttgagacaaacagaaatagaaacacaacatactaaatcttgtggaaagcagcaagagcagttctaagggggaagatcagagcaataaatgcctacaacaacaacaaaggtctctgaaacctaacattacaccctaaggaactagaaaaagacaagcaaactaaactcaaagtcagtaaaaagaaggaagtaataaagatccagtgtaatcagaaaaaaatgagagagcagaaaaacacaattgagaagatccttgaaactaagtttgcttttctgaaaagataaatcacaaacctttagccaaacaaaccaagaaaaaagaagagtcaatcagacatggaagatgagacattacacttaataccacagaaatacaaaaggtcataagacaacattatccacaactatatgcccacaagttagacaatctaaaagaagtagagaaattcctagaaagataaaacctgctaagactgaatcatgaggaaatagaaagtatctttcattaatgcagaattgaggaaaacaaattaggccaggtgccagtggctcacccctgtaatcccaccaccttgggaggctgaggcaggcagatcacttgaggtgaggagttttgagaccaacctggccaacatggcgaaaccgtgtctttactaaaaatacaaaaattagctgggtgtggtggtgcatgcttgtaatcccagctacttgagaggctgaggcacaagaatcactttaaccggggaggtggaggttgcagtgagcctagatcgcaccactgtacttcagcttgggcaacagagggagacttttatctcaaataaataaaattaagaaaaacgaaaacgaattaaaaatctgaactgaccaagaatgagaaacgagattcaatcagtaataaaacacttgcatcaaagtaaagcccaggacatgatgtgttctttgcagcattctaccaaacattaagaaaagagtaatgccaatcattctcaaattccttcaaaatatttaagagtagaaaacatttccattctcttttttgaggccagcattaccctgatgccaaagctacacacaaggataatacaagaaaaagctacaggtcaacattccctatgaacttagatacaaaaatcctcaacagaatactagcaaaaaaaaaaaaaaaaaattggcctgcacggtggcttcatgcctgtaatcccagcattttgggaggctgaagtgggtggattacctgaagtcaggagttcgagaccagcctggccaacatggtgaaaccgtgtctctactaaaaatacaaaaattagctgggcatggtggcaggtgcctgtattcccagctactcaggaggctgaggcaggagaatcacttgaacccaggaggtgaagcctgggtggcagagtgagactccatctcaaaaaaaaaaaaaaaagcaacacattaaaggattatttaccataatgaagtggtaggttatccctggatgaaggatgggtcaacctatgcaaatcggtgaatgtgatgcaccacatacaaagaatgaaaacataatccatatgagcatctcaacagattcactgaatgcattggacaaaattcaacattcttccatgataaaaactctcatcaaattaggtatagaaggaatgtacctcagcacaacaaacgccacatatgaccaacccacagctaatactatgcccaaagatgaacagttgaaagccttgcctctatgatcaggaacaagacaaggaagcacactctcaccacttatatttaacatagtggtgaacgttcttgccagagcaatcaggcaagaaaaagtaatataaagcattcaaataaaaaagaaaagtgaaattatgcttgtttagtaatgatcttatacacagaaaactcaagactaaacaaaaatactgttagaaataatgtgataataaatgaactttaaaaagtttgaagataagaaattggtgagcaaaattagttgcatttttatatactaacaattaactctctgcaaaagaaatcaaaacaatcttttttcaataaccagcaaaacaataaaatacatagaagtgattttgtctgaagaggtgaataacctgtaaacagaaaattataaaatgttgataaaacactgaagaatatacaaaaaaaatgaaaagatatgtcgtggttgggaattggaagcattaatagtgttaaaatgtccgtactaaccaaagcaatctgcagattcagtgcaacccctatcaaaattctaatggcattattcacagtaatagaaaaaacaatcttgaaattcatatgaaacccaaaaccccccaaattttccaaagtaatcttgggtaaaggaaacaaagctggaggtataacactacctgatttcaacatctactatgaagctatactaatcaaaacatatgacactggcatgaaaacagacagatggaccaatgggatggaatagagagctcagcaataagcccatgcattcatggtcagctgacttcaacaatagtgccaagaacacatgatgtggaaggatgcatttggatatctacatagaaaaacaataaaattggggttttctaatccgatttttattcaaatattgcctcaaaatgcgttaacaacttaaacataaggtctgaaactataaaactactagaataattcataggagaagagctacatcatatttgtccaagcaatgatttttggatatgaccccaaaagcacagtcaatgaaagcaaaaatagacaattgggattatatccaaaacttctgtacagcaaaaagttggggtgctggtggtgaagaaattttgattaattagtacaacgatatggttagaatgaataagctctactgttagcacagtagagattattgttaacaataatttattgtacatttcaaaatagctaagagacgatctaaaatgttctcaacgcaaagaaatgataagcatttaatgtgatgggtatcctaaattccctgattagttcattttttgcttcagtaaatgggatcttgctctgccacccagtggcgatcatggctcactgcagccttgaactcggctcaagggattttttccacctcagcctcctgaagtgctcagattacaggcataagccactttgctcagccaaaaggggccaaagggtggatcactgaaaggtgttatgtgaaaaattttgtgctgctacccaaatctaaatgttgaagtgccccgaatctccagtaccttagaatgtgttttgagatagaaccctttaagggcgattaaattaaaatgagggtgttagagtggggtccaatcaatctgactgatgttcttatagaaagggaaaatatggacacagagagagacaccagagtgtcgtgcacataaagactttgaggacacttcataatggcgaccatctgcatgccaaggagaaaacagcaagcctgccttcacctcaatcttgaacttccagtctccacaacactaagaaaattaatatctgttgtttgtgctacctagtcaatggcattttgttatggcagcctgagcagattaacacacaaggcaagaatctgccttttctttctttctttctttctttttttttttttttgagacagactctcgctgtgtcacccaggctggagtacagtggcacaatctcggctcactgcaacctctgcctcctgggttcaagtgattgtcctgcgtcagcctcccgagtagctgggattacaggcacccgccaccacacctggctatttgtatttttaatagagacagggctttgccatgttgctgaggctggtctcgaacccctgacctcaagtgatccacctgcctcagcctcctgaagtcctgggattacaggtgtgagccaatgcacccagcagaatctcccatttcaatgctgacacctctatgagtttctaataatctctcctcatgagttccaggttgccagtctctgaggatgtcagttcttacagcttgagcctctcagaaaggagaggtttcacagggaggtataaagaaagcagaatctgggcgtacatctcccattattattgtttgcccattttcaggaattaaaggataacaaagtcaccaaggggtcttctccattagagggaaactgctgagatgtagtgtgaagagtactgattggttttagacgcagaacttcctgttgctgtctttggacaaatcgttaacttttctaagtctgaatcctccagtgatatagcagttgccagcattcctcgcagggatattgtgagtctcacagggcattctgcacgtgaaaggaggtggtaaatataaatcactgcacatgtgtgaggcttcatattatagtcatagatgttttggatcttgcttcctgatttctgatgctcacagaatctaaaattacaggatttaaccaaagagggcatttttctcaaccttctgtaaaatccctttgttcttaattttcaccacatcagaagcagacttctatcttctagctctgacattattcagtgcatgggtcttaatttagaaaagtaactgagtgatgacacagagaggccaatgggatttttaaaggaaaggcagggcagagcagggtgcacagttcaggattggccagattgaggcattcctgagggccttggggaaaggggctgttcctagttgtctggtacctggctttgtgttgacttaggagagcagaatattggcttggtgtgtgagagtttgacatggagagggttggggcatgggctctgggtgggtaaattttaataggaaaggctggctccaggaaacccacttctacatctaagaatgtgctagccccaagatgggcagtctctacccagtcagggaagacacagtcacagcaccaaagaacacagaaaataaggaaatataataaatataattggccctgtgatggacaggtgccaaacagacaaatacagaatctaaagaaatggaattaaaacagagtttgtcacaaaaagaaagagaaatcctggggattttttttcaaaacaacttcacttctagtctttttttttttttttttttagatgaagtcttgctcttgttccccaggctggagtgcaatggtgtgatctcggttcactgcaacctccgcctcccgggttcaagcgattctcctgcctcagcctcccgattacaggtgcctgccaccatgcccagctaatttttgtatttttaggagagacggggtttcaccactttggccaggctggtcttgaactcctgacctcaggtgatctgcccgcctcggcctcccaaagtgctgggattacaggcgtgagccaccacacccagcccacttctattttttaaatttctatttctaaactagtctttgcaatttcagtctccagtgaagtctcgggttgacattacaggaagagggggagaacctatagggaagagaagggtctcagaggtggctatttggatgtaggactcataactgcctctgttcaaggtaggagaaaatgctgtagtgggtttcttcctctattgactctcctctatcttagcagtgcttgtggaaaccctagtttcttccttgggattcagccaatgaatgtcttactagcttgagtttcagcgactctagagttcatgtagaaagctctaatactacatgaatttagatattgtctgaggataaaactgatttgccttttttgcagggcaattttcagttattcttttgttcctgggttgaagaaactgatgcatatgtgtcttggagtttaacttttttttttttttgagacagagtctcactctgttgccgggcacagtggctcaccctgtaatcccagcactttgggaggctgaggcaggcggatcacgaggtcaggagttcaagaccagcttggccaacatagtgaaaacccgtctctactaaaaatacaaaaattagccaggcatggtggcgcatgcctgtagtcccagctactggggaggctgaggcaggagaattgcttgaacccgggaggtggaggttgtggtgagatgagatcgtgccactgcactccagcctgggcaacagagcgagactccatatcaaaacaaacaaacaaacaacaaaaaccataatcataaagatatattcacaaaaaattcttatggaatataggagccaaatatgaaataatttatgctgatttcatttatatcaagtagcaaacagacaaatgtgatttaatctcttaaatactggaataaatgtaaaccagtatcttgacagcaacacttctacaaatagttccaacagaacgacagccttgaggatagtgacttagcacagaggaacttctggtgaactggcagtattgtttcctcatccatgtgctgcataaagagttatgttcttttgtgaaattccagggaactgtgatttataacctataataagtctttgacttaatcaaaatacatatcactggaagccattatcctcagcaaactaacacaggaacagaaaaccaaacaccacatgttctcagttataaatgggagctgaacaatgagaacacatggacacagggagaggaacaacacacactggaacctgtcgaagaggtggaggggaggtagagcatcaggataaatagctaatgcatgcagggcttaatacctaggtgatgggttgataggtgcaacgaacaaccacggcacacatttgcctatgtaacaaacctgcacatccagcacatttatcctggaacttaaaatttaattttaaaaaaactattaaaaaaataaaaaataataatacatatcaccgaaaagagttaaaagaagttcagggtggggatattggtgctaagaatgtgtgtgagcttccacttgtgtctgtaccagataaaatttatgaagacgcaggcacaggttaacagccacagcaagaaacataagagaataataccaatgctatatatgctgattctttgatttttgtcctgaatacagaagaaaactatcctatcttgttttgtttgtaatgtttctgctgctgtttggcaatcacacgcatagggtaaaaccatatttatcagcatattcaaggtccagtagaggaaaatagaaagctccatatacttaggatagtttatgttaaattctatacatctggagttcctggggctcatcatgatggcttgaaacactgcaggcacaggtggtgccaacggtcacaccctaccaactctgtgaggatagcaaatcagaatccaaaatcatgaaggaaattattcaatataaaatctgacattgatttggtgctgcatacagaggtgtgtcttggggatacccttaaacagaatgcgtaagaagtggctataatcaggtgcttccaattcaaatctgtggtcctcaacctgcatcctgttaagtaaaagaagacataatagtaaagaagacagaaactcttcaggattccaacaaaattctacgacaagtagatcattcctattgccaactccctggaggccattctgcgagttcccagtgactgatattcatctttagagccagaagatcctgcagagaacatgaagtgtaggtgaggtgatattatccattaataatatcaatggaaaaacccgtattctactgagaaacatttaaagttttgttttgcaaagaggctttctagggttgaatgtataacatttaaagagcacttacgatatgggaatcactgctgtaatgtgatatgtataccttctttgatttttgtaactgtatgatggattcactggcatacttttccttgtagagacaaaaggaacttaagatacagagaggtgcagtgatttgtggaaattcacaagctgcttaggagctgagaggagacttgcacctgactagggtgtctgcaaaggtgattgctaaggcctgtgctatcctaacagaccattcagctgtgttttcaaaaaatctggacctagttagttttgtttgtttaccatgccattttattttccatctctggtattttattttataattttgttcaaaacaagtttccattcctgtgtaaagaattactgcataagtcaatatccaatgtcagtaacctttgaaatcccaatacactgttggtgcactatttagagtataatcctgaaggaaacttcccctggtacaagttggatttactgaatgcaagaatggctcaatattactttggtagcagaaaaactcattaactcatccaataggaggagaaaatactacagcatttatcaatgaaattattgaagtatattactctgtttctagactgttaaacatgaaatactaacaggtaataaaacaatatagatagaaactcaattattggtaatttttgatcagtcagaaatcaatatgttaatgtacaagttatgtgaaactattagcagggtagtgtaatttgtaaaatacattaaaacagaagaaatatctgcaaaatggaatctggagaacacaaaatcttgagcattatggatgttgaaatcatagtaaagtgaacttttacaactcaatagcaaaaaataactcctaaaacaagaaagtaatagatcaattttaaaatgggttaaaggcttgaatagcattactccaaagaagacattcaaatgcccaacaggtgtataaaaacatgctccatgtcattgattctgcagaaaatacaagtcgaaaccagagtgaagcatcacttcacacctcttataattactattagcaaaaacccaaaacagcaagtgtggcaaagaggcagagaaattgtaactcttatacgctgtggctgaaaatgcaaaatggtgctgtctatatggaaaatgatacagatgttcctcagaaaaattaaaatgaagccagatgtggtgcacgcctgcagacctgcagttactcagggaaactctgtctctaaaataaaataaaataataaaataaaatagtgacaattaccatatgatccagccttcccacttctgagtatatagcaaaataactgaaatcaggacctcagagatatcagaacttccatggtcattgcagcaccgctcacaatagcttggatgtggaaacgacctaactatccattgaatgatgaatggacgaaaaaaatgggatgtgtgaatatacagtggaacattattcagcctttagaaagaaggaaattctgcaagagatgacgacatggataaatcttaaggacgttatgctaagtaagtaaggcggtcagtgaaggacaaatactgcatgattcacttgtgtgtgtaatctgaaatagcctcatagaatgagagagtaggataggccgggcaccgtggctcatgcctgtaatcccagcactttgggaggtcgaggtcggtggatcacctgaggtcaggagttcgaaaccagcctggccaacgtgatggaaccctgtctctactaaaaaaagtgcaaaaattagccaggcatggtggcatacatctgtaatcctagctactcgggaggctgaggcaggagaatagcttgaacccgggaggcggaggttgcagtgagccaaaatcacacactccatctggggcaaaaagagcaaaactatctcaaaaaaaaaaaaaattaaagagttatgcagaatatttttgaccaggaaaaataacacaagatacagttgatcctgactactgctgtttgcaactcttaatagtaaagttacccttcccttaaatgctacttccctaacctcaagagggaaagcagcctcaccataatcctaagagcacagaggttttccgtggaggacaatcactgtctccattaagcgcatcatttatacagagttagatttcttaaaaaacaattttattctggaaatgatttcagatatatggtttctgcacaggataaggtaatttttctagctctatcctactcttcattataatcatggaggcagtataagcatattattaaaaatactgtaaatgtactgtgtgattcttatgaggtgtgtgaacaacatatatatttatttactacaatccttgagcaccataaatcttatttaattattactggaattattcaccaactctcatcctaagtgaagattttattaagttaccttcgttttgtttggtttctgagatggagtctagtattgtcacccaggctggactgcagaggtgtgatctcagctcactgcaacctccgtctcccgggttcaagtgattctcctatctcagcctcccaagtagctgggattacaggcgccagccatcacacccagctaatttttgtatttttagtagagatggggtttcgccatgttggtcaggctggtctcaaactcctgaactcgagtgatgtgcccgcctcagcctcccaaagtgttgggattacaggtgtgagccaccgtgctcgtccggattttattatgatagctttgtatccatcagggattggtataaggtttaggcctctcatctctctttattgactcagcccataagagagtaattattcctcctccctgtctggctttgctactgactttgtttctacaaaagagaaatccctttccagacatgaccacttggacttcttttcttgcagattctgcctgccagactgaaacacaaaaatactcacctgattccttcccactgccaggacagcccagtttgtgtgacggtcataacagcactgtgtgggaaggaggcagccagaccctgagataaaggtttgtgagtctgtgacctcatcttccctcagaagtgcaattataattttacctgtagcagcaatgacagctgacttagggagttgataactttttgaaaaactttttgcagttgctaattaccagaggcaattacaactttctcataaatgtctccaaagagaccactgaagtatccaaaagaggctcttactttttcacaatccctgaagactgcaaggagcagaaaatattgaggtttgatctgtgaggcacttgtagagaagcatgtttgtctcactggatttcctaattctatgagatactcttcttcctaaaatcaagctcatccttaatttgcagatccattatgtaagtattcagcaggtaactggaatcagataaaggatctagaatggattaataaaaaatgagataaatgtgagagaaaagcatggagtaatttgcattagaaatcgctggactcatttgtataattaaatgtaaattaatttagaaatgataatatggacacgttctaggaaatatactttactattgtgacctcagcagtgacagaaaaagtctggacataaaaatattctaaagagaaagatgtgaaaaaaaaaaagtctctcacaaataaaacacaaggatcacatgatttaacagccaaattctaccattctttttttttttttttttgagttgaagtcttcctctgttgcccaagctggagtgcagtggcgcaatctcggctcactgccacctccacctccccggttcaagcaattcccctgccttagcctctcaagtagctaggattacaggtgcatgccaccacacctggctaatttttttatatttttagtacagatggggtttcaccatgttggccagactggtcttgaacttctgacctcaggtgatccgcccacctcagcttcccaaagtgctgggattgcaggcgtgagccaccatgcccagccattcttttaattattagataaacctaggctatcttctcaattgaacagcagtagataggaaatttctctacatttaccattcctgaatttttagtaaaaagcactaaccagttatgccattaatttggaagtttaaaatagaagagccgaaaatgaaactttggtttcccaacacacaaatccacaatttgacctaagtccactctccattctcctaggagacatttgaggtaaactgagaagttacaggaaacatagtccacacaagaccacactcacttcagatgcccactgcaatttcagtgcttccccaaatcaccctaaagttggacaattcactggaagaactcatggaactccctgaaagctgccatgctcacagttacagtttattacatgaaaaagatccagggtagcatcagccaagggaagaagcagtcagggcagagtccaggataagcaccacatttggagcttccatttgtcttctccctgcagagtcataggtgaattcctttccaggaaccaatacacgacaacacctatgggatattgccaaccagggaagctcattcaagccctagtgcccagagttttactgaggtgtgatcacatactctccatagctgaccattagtttccagcccctcccagtgtccagccttatatatagatttacagttcctccagagttcagaattgatatggtatatccaaagccctaataaaaaatcaaaacgtatggccaggcgcggtggctcatgcctgtaaccccaacactttgggaggccgaggtgggtggatcacgaggtcaagagatcgagaccatcctggccaacatggtgaaaccccatctctcctaaaaatacaaaaattagctgggcatggtggcgcatgcctgtagtcccagctactcaggaggctgaagcaagagaatcgcttgaacctggaaggcggaggttgcagtgagccgaaattgcaccactgcactctatctcagaaaaaaaaaaaacaaacaaacttagtgttcaggaaacaagtctgaaagtaaacggagatactcctactagacatggcattttaagagcacggacaccactccctaagcacttgggggttacaggatgcagtgtgtttaaagggctctgctgggtttcagtgtagcatgagacagagtgtgcaaggaagttaagggaactgcacacattctgctctgagggactacggggtgcagtggttatggggataaaagggataatggagaggggacactaggcagaaatgagggatgggcaggggtgggtaaaacaaccaggaaggtttatgtccatcagggttaaagacacaaggagagaaagcatatatgtgggataagatttaaatatttttttcaaagaaagacacaagacagtgacacttggaaagaagaaaggcagaattctgttagttacagcttcaaaggacagaaaaatgtcaaaagagccacgcagggcgttgcaccaagggctaagtaacagcacgctggagcagtaggggggcttatgatgagtgtcggagctggaggctgagctagtgttacatgacgccttgtgagttggctatgttgaattatttcatggactctgggccaaagcagctgtccctggtaagctggtacatagctctatggggattagggtacatcgtggctttagggtgtggacacaatcagctgctcaataaggggaactagccaaccctagccagtaactcacatctgtgtcaagacaggattacaaataaaaggaaaaaaatctgctttaaaatctaataatgggatatggatgtcctcagagtagttaatattccaagacagagacagaggccaggagggggagctccagcctaacaggggagataagtaacacggtgatatgatgaataagatgctaagggctgggcgcggtggctcacgactgtaatccctgcattttgggaggcggaggcgagcagatcacctgaggtcaggagttcaagaccagcctgaccaacatggagaaaccctgtctctactaaaaatacaaaattagccgggcgtggtggcgcatgcctgtaatcccagcactttgggaggccgaggcaggtggatcacgtggtcagaagtttgagaccagcctggccaatatggtgaaaccccatctctactaaaactacaaaaattagcagggcatggggtgggcgcctgtactcccaacaactccagaggctgaggcaggagaatcgcttgaacccgggaggtggaggttgcagtgagcagagattgtgccactgtactccagactgggcgatagagcaagactcggtctcaaaaaaaaaaaaaaaaagaaaagaaaaaagaaagaaaaaagaaaatgtagaaggtttgggtggatgggggtggggcaggtgtcagtaaaggggttatagaaggatgggacagagagaagattaggggatgaataagccctaaacggcagtgggatgatggtcaaggtatggatagtggtggatgggattacatcttcaaagtctttatttctataaaggtcgtgtgctgaggtactgggggttaagatttcaacatgaattgggtgggggaacacaattcaacccatagcagaaagtgcatgttgatgccataaaaggcatattctcaaaatgtagatgagatatttcaagataatgagaagggggcttagaggagaagagaagaaaatccttctttcctaggccaatgtggagtaccaggtgagatgctgtgtcctctcttcctcaggaaatgccatgtctttagaatttgaagctctttactgatttctgcttctgagatactgagcctagaatagaatatgttagttgtgtgtacgatattgagcctagaacattatatgttagttgtgtgtgtgtgtgtgtgtgtgtgtgtgtgtgtgcgtgtgtgtagacagagagcaacttcagatccaatttcagattgaatatgtattcaatcctcagagggagaatacaccttaataccaaaaattgttccttctggagatccaaatagtatcagtcatggattattaatgaacaatttgcctttaatttattatttaaatattttcccattaaatttgtatctatgtatattcctttttttttttttttttttttttgagatagagtctccctctgtcacccaggctggagtgcagtggcatgatctcggctcactgcaatctctgcctcctgggttcaagggattctcctgcctcagcttcctgagtagctggtattgcaggcgcaccaccatgcctggataattttggttgtatttttagtagaggtggggtttcaccatattgaccaggctggtctcgaattcctgacctcaggtgatccgcctgcctcagcctcccaaagtgctgggataacaggcatgagccaccgtgcctggcctagtactatttttacatagtatatactatgtgttatcatacgtaaatatcctgaagttcattaagataagcatgcacatcgcattcttgatattatataatacatattatattaattcattatgacagttcattttatgtgtctgcttgactaggccaaggaatgtgcagatggaacatcatttctgagggcgtctgtgaggatgattccagatgagataagcattcaaatcgatgttctcagctgagaggattgccctccctagtgtccctgggcatcatccaatcagttgaaggcttggatagaacaaaaggtagaggaaagaagaatttacctctttttcctcctgccttcctgcttgagctgggacattgatcttttcctcctttggtctaggactggcaccacggacttcctggttctcaggcctttgggctcaaactggaattacaacactggcttttgttggtctccaccttgcagatggcagattgtgagacttctccataatctcatgagccaattcctcataataatatttttcatatatctatgtacacacacacaactactgtttctgtttctctggagaaccctatgtgtgcaattatgcacacattttttgtctcctatgcatattctttatttttctttaagagatggggtcttactttgtcaccccaggctgaagcacaaaagtgtgatcatagcccactgcagcctccacctcctgggctcaagtgattctcctacctcaacctcctgagtagctggggctacaggtgcatgccgctgggcctcactgatttaaatttttttttcttgtagagaggggtctccctgtgttgcccaggctggtcttgaactcctgggctcaagtgatccacccacttcagcctcccaaagtgctgggattacaggcttgagccacagcacccagcctcttatgaatagtctttttttttttaaacttttattttaggttcgggggtaaatatggaggtttgttacataggtaaacttgtataatgggggtttgttatacagattatttcatcacttaggtactaagcatagtacctgatcagtatttttttctggtcctctccctcctcccagcctccatcctcaagtaagctccggtgtctgttgttcattcccctccatctgtccatgtgttctcatcatttagctcccacttataagtgagaatatgtggtatttgattttctcttcctgcattagtttgctaaagataatggcctccagctccatccatgtccctgcaaaggacatgatctcattcttttttgtggctgcatagtattccatggtgtatatgtaccacattttctttatccagtaccattgatgggcatttaggttgattccatgtctgttattgtgagtagtgctgcaatgagtatataggtgtgtgtgtctttatgggagaatgatttatatttctttgggtagatactcagttatggggttgctaggtcaaatggtagttctgtttttagctctttgaggaattgccacactgctttccacaatggctggactaatttacactctcactaagtgtataagtgctcccttttctccacaacctcaccagcatctgttatttttttgactttttagtaagagccatctgactggtgtgatgattgtggctttgatttgcatttctctaatgatcagtgatattgagctttttttcatatgatcattggctgtatgtatgtctgcttttacatgtatgtcatcttttacagctaattaatgagtgcaggaatgttgcaaggtgcaaagtcaacataaaaattagttgcatttgtacatactaacaatacactgtctgcaaaggaaataaacaatctcattacagtagcaccaaaaatacttgaaaatgaatttaaacacgtgggtgaaatatctgcacccttaaaactataagacattgatggaagaaattggagaagacataagtaaatgaaaatacatcccatgttaatggatttgcagattcagtatttctaaaaggtctatagtataatgagtgatctacagattcagttcaattcctataaaaatatcgatcgtatttatcacactaatgaataaccaatcctaagattcatatggcaacagaaaaagaactttctactgagaaatcacaagacctacaaattcagatgggagaaatcatttcttataaagggttacaggctacaaggtggccattctgacagactgggaagtgtaaattccagtagagctcccagtggaaaagaaatttatgctgaacgagttggccaagtatacatattcaacaggtaacaggatgagctatgactattcatgcacggggccccaacgcatgcattttgaacaaacatgcatgctacctgtgtctcatgctaaccttgagatggaggttgaacatttaaatgtattgcaattaggccctacaagtcaaaaggtgaaggtgctctgtgtgcagcctctgtaaaacccaccagaagcagtccatggttggtggtctcttatcaggagaatgttaccaaaatcagtctcttgtccaatcaaagctatagttatggcttgtggaacacggggctctgggtcagtatctggtgatggatatactgcaattgttttaatattgcttgttttgaggccaatgcactttatttttgctgctagagaaaaagaacaaccgtatggcagttagaacatagtttattctttaagtgtaggggtgtgtgacttaacccttgcctggtgtggctttaggtcttgttcataatttggtatctcattgccccaaagaatccattctgttggtcttgtgatctcgatttatttatttatttatttatttatttttgagatggagtcttgctctgttgcccaggctggagtgtagtggcttgatctcggctcactgcaacctctgcctcccgggttcaagcgattctcctacttcagcctcctaagtagctgggactacaggcgtgcgccaccacacctaatttttgtatttttagtagagatgggggtttcactatgttgcccaggctggtctcaaattcctgaccttgtgatccacccgcctcggcctccccaagtgctgggattacaggtgtgagccactgggcctagccatgatttctattttaacattaatgttggtcagttgttgtgtttacgccacaaaaggagggtataacgaaatatctaacctcccatcctgtcttggcctgaactcagtttttgttgttgttgttgttgttttctgtttttcttgagacggagtctcactctgtcgcccaggctggaatgtaggggtgcgatctcggctcactgcaacctctgcctcccgggttcaagtgattctcctacttcagcctcctgagttagctgggattacaggcgtgcaccaccacgcctggctaattttttgtatttttagtagagatagggtttcaccgtgttggtcaggctggtctcgaactcctgacctcgtgatccaacctcccaaagtgctgggattacaggcgtgagccactgtgcccagcctagaactcagtttttaaggttcctctggggtccccttggccacaggtggttggagcgcttaggattttatttttagctctcagaacccaaatagccaaagcaatcttgatcaagaagaacaaggctggacaacaatcccaccacggctcaggaaagcagccagggcagatggactctaagtgagtttcacttgcactgaaggcttaaggaaggacctagagagcaagctaccctgggtttcataccctggggtcacatgaacaatgggctaaagcattgaaggatatccagtgtctagcaaagactgaaacagaacccaggctgttccagccagcccctccctatctcaggaagctccatttccagaacactctacagttattcttgagaactatagcaagaaagggaggagaactgggtcagtccatgatcacttgaagaactatccattggttacttctgtgattatgttatgttacatggtaaaagggattttgcgattgtaatgaaggttactgcccagctatttatttatttatttatttatttatagagacggagtcttgctctgttgccaggctggagtgttatggcgccatcttggctcactgcaacctctgactccctggttcaagcaattctcctgcctcagcctcctgagtagctgggattacaggcacatcccactacgcctggctaatttttgtatttttagtagatctggagtttcaccatgttggccaggatggtctcaatctcctgacctcaagatctgcccgcctcggcctcccaaagtgctgggattacaggcgtgagccaccatgcccggcctgcccagctgtttttaagacaggaagatagccctggattatctggtagacccagtgtcagtcccaattacatgagcccttaaagagggagaataagacagagagatgcagcagaagaggaagtcagagataagcaacatcagaggggtggtatacattattgctggtattgaatatggtatggatatacctgcacaaagaaactctcagaagtaaataaatttttgccaacaatctaaaagatcttgaaagtggattgtttgtctcccagtgtctcgagatgagagcccaggctggctgatccttgatccagcctttttacaccctgatcagtgtatccggccaggccttgagatttctgatccaaaaacagcaaaacaataaatgggtgtcatattaagttgctatgtttgtggtaagttacattcttcctataaaacaaatttaatgctaaaatatttaaataataaaaataaagatacattgttcattaataccatgactgatactgtttggatctccaaaaatagctattttcttttcctttgagacagagtctgcctctgtcacccaggctggaatgcagtggcaccatctcggctcactgcaacctccgcctcccaggttcaagcgattctcatgcctcagcctcttgaagtttctcactgtctacacacacacacacacacacacacacacacacacccataacataatctgttctaggctcagtatctcaaaaacagaaaggtaaatatcttcaaattataaagacatatcatttcgtgaggaagagaggacacagcatctcccctgggactccacattggcctgagaaagaaggattttcttctctttccttctaagcctctttctcagtatcttgaaaaatcacagttgcattttgagaacaagcctttttaaaaaaatgttatcaacctgcatcttctgctgtgggttgaattgtgtctccccaaaattcgtatattgaaatcttaggacaggcatggtggctcatgcctgtaatcccagcactttgggaggccgaggtgggtggatcacctgaggtcaggagttctagactagcctggccaacatggtaaaaccccgtctctactaaaaatacaaaaattagctgggcatagtggtgtgcgcctgtaatcccagctactagggaggctgaggcaggagaatcacttgaacccaggaggcggaggtggcagtgagccgagattgtgccactgcaatgcaacctgggtgacagagcaagggaaagaagaaagagagagagggagaaggaaggaagggagggagggagggagggaaagaaggaaggaaggaaagagaaagaaagaaggaaagaaagaaaggaagaaagaacgaaagaaagaaagaaaagaaagaaagaaaagagaaggaaagaaatcttaacccccagtacctcagcatgtggccttatttggaaatagggtctttgcagatgtatctccatcccccaatctccataatgcttctttgtccacctgaataacccccccttgatgtccaccccactgccttttaggtctttattcgtcccctagtcctctccttgtcccatcactctccaacccatttgtctatatctgttcccctgccccctcatccatccaaaccttctagatattcttaccccacctaaattcaacaccaatttggattccttcctctgtcaactttatgccctgcacaattacggggatctcagcccaacagtcccccacccttttaggaccgtcacacccttcctcttgacttctagtttctcccattcttgtgcccatggctcaatttccacattctccatgtcttctcccttgaaatcccagatctcaatcataggttgccatcagctccctctgtccctcacccttcagcatcctcaagtccaccatcctcaccaccttattaatcaccagaaatcatttcgtctccccgtgtccattatctctcctgcaaggcttgagctccccctcctggcctctgtctctctcttggaatattaacaacccccaggacatctgcactccaccgtaagaccttttttttttttttttttttttttttttgagacagagtctcgctctattgccaggctggagtgcagtggtgcaattttggctcaccacaatctccgcctcccgggttcaagccattctcatgcctcagcctcccgagtagctaggattgcaggcatgtgccaccatgcccatctaatttttatatttttcacagtgatggggttttgtgatgctgcccaggctggtctcaaactcctgacttcaggtgatctgcctgcctcagcctcccaaagtgctgggattacaggtgtgagccaccgtgcccgaccagattttacagtatcctttttggttaatgctgccttgactcagatttgagatactggctagagttggccagttcccctaattgagtagctgtttaagtctacacccccaggccactatgtacccattttaatcctctcagggctatgtaccatgtaacctgccacgatccctggtggactgaacaaaaggggcaaacgcaggaataaaagacaaagagagtatatttggaaaagggggaaacttgcctctagtggaaaaggctctgagctttttcagccctccaaatttattaggtaaaagagataacgagaaagagaggatgattattgggtaattgtcagtcggcaattttggttcacagcaggcttgagagactgcatccttcaaaccataggtgctagatttcccagtagataacttcaaggagcccggcaccagggagtgatggccctcagcaaacctcctggtggcaggtgcagtcatgagttttctcacgtcctgtaatcatgataaacactttgctgtttgatcatatagcctccagtggaatgctgagttggtcacaatccctttggccttttcggctcccaaacagtaccagattactaggtacagccactttgccttgaagcccttgaaatggttcaacttagccaactcacagggtgtcctgcaacactagctcagcctctcgctctgcttgccctcataagccccggtactgctccagcttgctgttacctgacccttgctgcaatgccctccatggctcttctgacatttttctgtcctttggagctgtaggtagcagaatactgcctttcctctttccaaatgtcactgtcttgtgtcttttcatgaaaagaatctttaaatcttattcaacatatacacatctccatcctccatgttctttaagcatctgtggactttatctctcctgggtgttttacccactccgctccatcacttacttctgcctatggtcccctctccattattcctttattcccatgcccactgcatccctcagttcctcagagttcactgtgtgttattccctaacttccttgcacactttgtcccatagtgtcctgaaaacccgcagtgccctttaaacacattgcatcctttagccgcaagtgcatagggagcggatctccgtgcccttaaaaagccgtgcctgatacgagtgcctctgtttgcttgcaggcttacctactgaacactaacactgtgatttttgattagcgatttggataaaccatatgaattccaaattctggaggaactgtgcaaggctggacagtgaggaggggctggagatgaaaggtcaaccatgcaaagtatttgaccacattccactataactctgggcaccaaggcttgaatgagcttccctggttggtaatattccataagtaccatcatttattgatgctgggaaagtaatgcttccatgactgcagggagaggacaacaggaaactccagatatggtgcttttcctaaattctgccccatctgcttcttcccttgtggatgttaacctgtatttttccctgtaatatactgtaaccatgagcgtaacagctttcagggagttccgtgagttcttccagtgaatcatccaactatagagtgacttggggaaattctgaacttccagttggtgtctgaagtgagtgtggtcttgtgtggactgtgtttcctgtaacttctcagttggcctcaaatatttcctagaagaatggagagtgcacctaggtcaaattgtggatttgtgtgttgagaaatcaaagtttcactttggactcttatattttatttattttctttgttttttctgagacggagtcttactccatcgcccaggctggagtgcagtggcggatctgggctcactgcaacctccgcctcctgggtttaagcgattctcctgcctcagcttcccgagtagctgggacttgacaggcgcccgccaccatgcctggctaatttttgtatttttagtagggatggggtttcaccatgttggctaggctggtcttgaactcctgacctcgtgatccacccacctcagcctcccaaagtgctgggatgacaagcatgagccactgtgcctggccctattttctttttttcttaagactaatcaagtgcagtagtgacaagggggaaagagtagaataaggagttccatctgtaactgactgtgaacaatccattgagataactgactatcttcggacctggctcttacattttcacttcccaattgattacataacggatgagtgcttctttctagaaattgaggaacagtgtatatagagagttctggtaactatctactgctgttctacctattaaataatgcagtaagcagcagatggttacctattatctaattttacctattataaatatctaataggtaaaagaatggcagaatttgcctgtcaaatcatgtgaattggtactttatttttgatgggcattttattcagcatctttctttttaaaatattttcttaatttttaaatttgttatatataaattatataatatataacataaattttatacacacacacacacatacacacacacacacacatatatatatatatatatatataattttctttttaaagacagagtctcactctgtcacccagactggagtgcagtggcacaatctcagctcactgcaactttcgcctccctggtccaagcaattctcatgcctcagcctcccaagtagctgagattacaggtgtgaaccaccatacctggctaatttttgtatttttaggagtgacgggtttcaccatgttggccaggctggtctcgaactcctgacctcaagtgatccacctacctccacctctcaaagtgctgaaattacaggtgtgagccaccacacccagccttattttttatttgtattattatttttgagatgggctccggctctgtcacccaggctagagtgcagtagcacaatctcagctcactgcaacctctgccccccaggctcaagcgattctcatgtctcagcctcctgacctcctgagctgggactacagacacatgccaccatgcccagctaatttttttgtatttttggtagagatggggttttgcaatgttgcccaggctggtctcaaattcctgagctcaagcgatcagcacgccttccagagtgctggggattacaggcatgagccactgcctccggccaagaatattttcatgtttagactttttctatcactgttggggtcaaaacaggaaagtatattttcctacaaaacgtccatatcatcatttctaaattaatttctgtttatacaaataagtccaatgatttctaatgcaaattattgacatcatgtttttcttttgcacttatttcatttcttattattaatccattttagattctttctctgattccatttacttgctgaatacttaaataatggagcagcttaggattctggaaattaacagtgaacttgattttaggaaaaatatctcagagaagtagggaatccagtgagataaaggtgcttctctgccaattcctcaggcatcagacctcaatattttctgctgcttaaagccttcaggaatcttgaaaagtaaaagccccttttgtatactttaatgatctctttgaagacaggagaaagttgtaattgcctttggtaattgcaactggaaaaaaaagtttttcaaaaatgttactgtctcccaaagtctgcactgttattgctgcaccaggtgaaatgataattgcagttctaaggtgaggtgaggtcacaggatcacaaaactttatgtcagggtctggtggcctccctcccatatttgcacaagttgttgtaatcttcacactgaaccaaccactctggcagtgggaagaagttaggtgagtatatttgtttttcagccagagaggtagaatctgcaagaaaagaagtcttagggccaggcatggtggctcacacctgtcatcccagcactttgtgaggccaaggcggggggtcacctaaggtaaagagttcgagaccagcctggccaacatggtgaaaacccgtctctactaaaaatacaaaaaattagccaggcgtggtggtgggcacctgtaatcccagctacttgggagactgaggcaggagaatcgcttgaatccaggaggtggaggttgcagtgagccgagattgtgccattgcactccagcctgggtgacactagcaagactctctcaaaaaaagaagaaaaaaagaagtcttagtaattgattatgtccagaaaaggggttcctctgaggtagaaacagaaccagtgctaaagacagacaaagaggaggaataattccttatgtataagctgagccagtgaagaaagatgacagtcctaaaccctacaccaatccctgatggatacaaaggtatcttaacaaaatcctcacttgggatgatggttggtgaataattccagtgataattaaataagatttatggtgctcaaggattgtagtaaataaatatatgtgttgttcatatacctcccaggaatcatacagtaaattcataatatttttaataatatgcttgtactgcctccatgattataatgaagagtaggatggatctagaaaaattaccttatcctgtgcagaaaccatacatctgaaatcatttctggaataaaataatttgtttttttaagaaaccttgctctgtataaatgatgcgcttaatggagacagtgattgtcctccacagaaaacctctgtgctcttaggattatggtgaggctgctttccctcttgaagttagggaagtagcatttaagggaaacgtagctttactattaagaatttcaaacagcacttgtcagggtcaacggtatcttgtgttatttttctctggtcaaaaacgctctctataactttaaaattttttgattttattgtagtgagattacttacaatgagaactatcctcttaacaaatatcttagtgtacattatagcactgttacctataggtccaatgctgtgcaggggatctctggaagttattcatcttgttttcctgagacttcttgcctctgaattagcaactcttcattaacccctccccgcactccctggcagcctccgtcctactctctcgttctatgaggctatttcagattacacatacaagtgagataatgcagtatttgtccttcactgactgccttacttacctagcacagtatccctacggttcatctatgttgtcatctcctgcagaatttccttcttcctaaaggttgaataatattccattgtgtatttatacaccaagttttcctcacccattcatcattccacggacagttcggtgggggctattgtgagcagtgctgcaatgagcatggaagttctaatatctcttggaggtcctgacttcaattcttttgctaaatactcagaagtgggaaagctggatcatatggtagttcttattttattttgttgtttttttttttagagatggagtcttggtatgtttcccaggctggcctcaaactcctaggctcaagctatcctcttgcctccgtcccctgcataattgggtctgcaagcatgcaccacctcatgtggcctcattttaattttttgattaatgtctatattgttttccctacaggcagcaccatcttacatttccagccacagtatccaagggttccaatttctctgcatctttgccataccggctgtttttgctaatagtgattgtaacaggtgggaagtcatacctcattgtggtttttacttgtgttttctacataatcagtgacattgagcatgtttttatataactgttgggcatttgaatgtctcctttataataatgtctattcagatctttagcccatttttaaattaggtctatttttgttttgttttgttttaggagttattttttgctattgagttgtagaagttcatttccctatgatttcaacatcaataatgctcaagattttatggtctctggattccgtttttacatatttcttctattttattgtattttacaaattatatttccctgctaatagcttcgcatgacttgtacattaatatattgatgagtaaatgatcaaaaattagtaataattgagtttctataccgttttaatacatgttagtatttcatgtataaaagtttagaaacagagtaatattgttcaatgattcatttgatagataccattgtacgttttctcctgttgggtgagtaaatgagtctttctgctaccaaactaatattgagccattcttgcattcagtaaatccaacttgcatgtgaggaagtttcctttaggattttaatcagtgcaccgacagttcattagtatatcaaaagttattgacattggatattgacctatacagtaaatctttacacagaaacaaaaacttgctttgatcaaaattataaaagaaaataccagtgatgagaaatcagtggcatggtaaacagacaaaactaactaggcctagattttttaaaaacacagctgcctgatttgttagcgtagcaagtccttaggttgttgtctttgcaaccaccctagtcaaattcgagtctcttttcaaccctgaagatgcctgtgaattttgacaaatcattgaacctctctgtatctaagttcttcttgtctctacaaggaaaattatgccagtgaatccatcatacagttacaaaaatcaaagaaggtaccatacataccacatgataggcacgattcctatattgtaagtgctatttaaatgttatacattcaaccctagaaagtctctcagcaaaacaaaactttcaacatttttcggtagaatactgtttttcagttatgtcattaatgcaatctacacctcgtgttttctgcaggatcttctggctctcaagacgaatgtcaatcactaggaactggcagagtggcctccagggataggaggaatggtctatttatcacagaatattgttggaatcctgaaaaatttctgtcttccttaccattgtgccttcttttatttagcagggtgcagattgaggtccacagatttgaatcagaaacacctgattatagccacttcttgctcattctgtttaaaggtgtccccaagacacacctctgtatgcagcaccaagtcaatggcagattttaggtgatataacttcctaaatgatttcagattccaatttgtttctgtcctcacagagttggtagggtatgaccgttggcaccacctgtgtctgcagtgtttcaagccatcatgataagccccaggaactacaggtgtgtagaatttaaaatgaattatccaatgtatattgggctttccatttttctctgctggaccctgatacattgataaatacgattttttccagccgggtgcagtgtctcacacctgtaaccccagcactttgggaggccgaggtaggcagatcacttgaggccaggagctggagaccagcctggcccacatggcgaaaccccatctctactaaaaatatgaaaattaaccaggcgtggtggtgcaggcctgtaatcccaactacctgggaggctgagacacaggaattacttgaacccgggaggtgtaggttgtagtgcgccgagatcgtggcactgcactccagcctgggtgacagagtgagactatctcaaaataaaaaaaaaaaaaaggatttttcccatgtttataattgccagatatagcagcaaaaacatcacaaagaaaacaagataggatacttttctgctgtattcatgacaaaatcaaatcagagggtcaatatctacaacattgttattattccctaatatttcctgtgtttcttaatctgtgcctgtggctctataagttttctcctgtacagacacaagtggaagctcattcatgaccttagcaccaatattccctacccccaccaaaattattttaactccttttggtcttatgtatttttatcaaattaaagagccatcacaggttataaatcacagctcattggaattttgcaaacaaacatagctctttatgtaatacatagatacaaaaacagaacactgttctgttcacaagagttcacaagaagctccttctttgcactctaagtcactacctacaacagtataattctgttgtttctatttgcaggagtgtaactcttgagattttggtttacatctcttccagtatttaaaggattaaattattttggcctgtttgctactttatataaatggaatcaacatgaattcttttatatttagcttttatatctattccattagaatttttgtgtgtgaccataccttaattattgcattctattaatggtactcattagcattgcttcctatgattccattgtatgaataatcagatgatcgagtcatactatttttttgtttgttttttacttttgtttgtttgtttttgagatagagtcttgctcttgtcacccatgctgaagggcaatggcgtgatctcggctcactgcaacctccgcctcccgggttcaagtgattctcctgcctcagcctcctgagtagctgggattacaggcacccgccacaacacccagctaatttttttgtgtgtttttggtagagatgggttttcaccatgttggccaggctggtgtcgaactcctgacctcaagtgatccgcccaccttggcctcccaaagtgctgagattacaggcatgagccaccgcgcccggttgagtcatactattgttaaaggccatgtggtaattttgagtttgtggcttttatgagcaatgaatagtcctacctatataaactatgtaacttatcttttgttgatatatatatgaatttgtgatggataaattcatagaagtgaaattattgaagcataaattgacatctggtaggcttatgtagctgctaccaaacagttttccaaaatgtttgtatccatttcagcacccaccagcagcgcatgagttcttggtttattcacaaccttgccacacttaatatttcctgtcattttcttttttcttttttctttttttttttgagacagaatcccattctgtcgcccaggctggggtgcaatggtatgttctcagctcactgcaacctctgcctcctgggttcaagggattctcctgcctcagcctccctagtagctgggattacaggcgcacgccaccacgcctggctaatttttgtattttttgtagagatggggtttcaccatggtggtcttgaactcctgacctcaggtgatccacctgccttggcctcccaaagtatgggattacaggcgtgagccacagtgccctgcctaattttttgaattagctgaaattttcttttggccaatattaaggtcactggtgaatattctatgcatgccttatagggataaatacgaaataaaaatgagagcctgcattcctcctttgaaaatatggcaaggcatttctcttcctcctctttttgtcagaatatttaccttagaaaacttgtgagtactttctcccgaaatgtttatttttagaaactaaataaaccttttgtcagcataatgacctagggatatctttctcaaggacttgggagacatctctttcaaatgtcaacatcactagagatagcacctgtatctctctgtttctgtgggttggtaggagcctatctacagtgggtacctggctccattttgtaaaactaccacctgttgtaaacatataagttagggttttcccccctgcttctgaataaagctaattggctaacatagatggtctccccaattaccatgtaaggtcaggatgaacaatgtataagcaatagcgcaatcaagtttttgaggctaatcagtgcttatctcaaaaaccagtctataatgggttgtatagaaattattctttttcctatctcctaacggattgcctctattgcgtatgatattcctgttaaatgtttattcatcaataaaattgttggccaggtgcagtggctcacacctgtaatcccactttgggaggccgaggtaggaggatcacttgaggtcaggagtttgggaccagcctggtcaacatggtgaaaccctatctctgctaaaaatacaaaaacttagctgagtgtggtggcacgcgcctgtaatcccagctactcagaaggctgaggcaggagaatcacttgaacctgggaggcggaggttgcagtgagccgagattgtgccactgcactccagcctgggtgacagagcgagatcctgtcaaaaaaaaacaaaaaccaaaaatgtccatgctgatcccttgaaaattttagaagcaacaaactccccatatacataatgggtttataactttaagctataatcagcttatcctctactttttagtttcatgaaaagctctgcaatcaactcatttctttgcttcagatcataaaagtcaatgctaaaagttgtttcgtggcaacatagctatttagcaatattgtgtaatatagacatctatcttgtacagatcccaaaatctatcccagatactgcatcttcaaaaaataatgctgacctaggccaccatggagtgtgcctggagtcctagctacttaagtggctgaggcaagaggatgtcttgagcccaggagtacatatgcagcctggaaaacacagttagaccctgtctctaaaaaataataataataatcgaagtaaaatatgctgatatgggccgggtgcggtggctcgcgcctgtaatcccagtgctttgggaggccaaggtgggcggatcacgaagtcgggagttcgagaccagcctggccaacatggtgaaaccccgtctctactaaaaatacaaaaaattagctgggcatggtggcaggcgcctgtaatctcagctactcgggaggctgaggcaggagaattgcttgaacccgggaggcagaggttgcagtgagtggaggccatgccacagcacaccagcctgggcaacagagcgagactccaactgaaaaaaataaaaataaaaaatgctgatatgtcatctcgtatccatctttgtgacatatcactatatcctcattttaacctgctaatattttaaatatgttcattttcatatctaaacatgatcatacttcaagatggatgaagggatccaaaaatagggatataaggccgggtgcggtggctcacgcctgtaatcccagcactctgcaggccaaggtgggcagatgatcacctgaggtcaggagtttgagaccaccctggccaacatggcaaaaccccatctctactaaaaatccaaaaattagccaggcgtggtggcacgcgcctgtaatcccagctactcgagagcctgaggcaggagaattgcttgaacccaggaggtggaggttgcagtgagctgagatcgtgccattgcactccagcttggatgacagagttagactctgtcttaagaaaaaaaaagttgggggggtgagatatcagagaaaagcatacttattagtacctgttaattcaaaaatattgccataaaattattgccggcagacgtaaggctatttaaaatttgataatctagttttacttctatcagggttctataaaagaataatcggcctaccaaatacacttagaattactgcagagttattctttagatcaataaatacaattgtcttctgaagactattttaagggctttgttatctacaggggccagtacattgaagaagagaaaacaaacaagatttaagagattataatttttaaaataaaaagtatgtttacttattactttcagaatgcacctaaagtgaatctgaaattacagtatttttagaaaatattgacctaagcctcagcctcccaagtagctgggattataggcgtgtgccatcacgcccggctaatttttgtatttttagtagagacggggtttctccattttggtcaggctggtgtcgaactcctgacctccagtgatacgaccgcctcggcctcccaaagtgctgggattacaggcgtgagcaaccgtgcccggcctctattgcttttttaaaagcaatagctggtgacctgacttctcaccggccttagcactccacgccccagatgtggcccaggaaactctttggaactctctactccagagtgaatggggaatagaaatggagaggatttctatgctattctgtggggcgtcagcgtgaaattacacattctgcacaggttgagtttgcatattgtattttagtttgcattcctttcacagacaatttaagggattttcaattaaatttctaaattttaattgaattccttaattttaattgtgggaactttcctggatccaaacaacagacgttgaccctcctagtgagatcccaggtcacaaaccgtggagcggctccagcctgactggcaagtgtggcttgcaaaacgcggaaaaccgagacacgcccagagataggaggagggaagtgcaggccccgtccaataagtattcaggccccgcccgccacgtcgctggccacgccccggcccggcctctccgttcgcgcgcagccgcctgcagacccggaagtggatggcgtggagatatggcgcaactgcggcgcgtgagttttcctttgtttagattaagtgttcgcttagcggtgccctcacgcttctgtacccgggatgtggggggcggtacagaccttgaaatccccgcaccgctctctccaccccgagtaaattcatgcgtcccgtcagagtgttaaaatcgccctagggctggttctgtctccggtcgttctgccgtagggctgcgtaggcagctgctttcgcgccgttttcctgcttaaaacccttcagtgacccctccgccagccccgcgccacgtaaagtccccgcctgcgaggcggatccacgccctccgggtcccaagcctcgtccttgtcggcccctggggcgcagcgccgcagccgccattcgggaggggccgcgtcctctgcctggtctggggattctgcagaccccacccctgatctgcctgccgccgtagtcctccttgggccgttcccttctgtccccaggccttttcgcagtcacggcttctccggatcctgtgttgggggaggtggccgggacctatctcagggcacccagtgttcttccgtcccaaattcctcccattggaaactgtgctcttgaggaggtgggtattttattccagtcccctccctgtgaatgtgaagtgaaagagagatggagagcgaggtagaggaaacagaaaaatttagagagaaaataatgaggaagatccataacaagacggcaacgcagagggagggtgagagatttgcaaagtgaaagaagcaccccaggaagtagcagggagagaaaagcaactcgagaaatgtagagaaaagttctatttctagacagatgaaggacagcaaggtagggagaggggcagcaaagcgggaggctcctcagacaaagttggggagaggaggagggatttggagccagggcagaccgagcagcgtggtgctggcacagcaagagggggcagccggtgacaaggagggcaaagggagaaccaccccagagatctggggttgccagacagtagggacaagggggcgtgacagagaagagggaatttaacaggaggagcacagatgggagaagaaagaggcagaaatatatggagattggagacaatcaaaagattggagagaaagagcaacaagaggaaaaaaattgcaagatggagcagatgaagtggaaaagaaggaatagagggaagaaggggagaaactgcgggagaggagaggggctcaaaatctcggctcactgcaaccttagcctcctgagttcaagcgattctcctgcctcagccacccgagtagctgggactacaggcgcccgccagctcgcctggccaattttgtatttttagtagagacagggtttcaccgtgttggcctgacgggtcgtgaactcctgagacctcaggtgatctgcccacctcggcctcccatagtgctgggataacaggcttgagccaccttgcccggcctcctcacattttattaatttgctggaatggttcccagaactcagagaaaattttacttaggtttactatcagttataaaggttattacaaaggatacaggtggaagagccatcctagcaaatcaaaatagaggagtgtgttttggaaaccgttaattttatccatatctgaggtgaggggcagtcttgtgggactgagtccttaactgggatctgattctatctccaggtagatactatcaaaattgagttaaattgtgggtcatccagctgggagtgtgccagagaactggtcagtatgcggaaaaacacgtgcacatttccatctcaaccagtaaagggaagagatctccaaccggcccacccacctgtctcagggcctgtgatctctactcagtagtaactgggaatggtctgtccctccccctggctgttgctgaccctgcgattgtgcaccaggtgccagccctactcacagtctcaggacagtgtgacatccttcctctggcatcaccaatatttacttcaagggattactttggttagtgcacccacatggaggtattgtccatgaaaacacacacagacacactggctgggtgcgatggctcacgcctgtaatcccagcactttgggaggccaaggcgggtggatcacttatggccaggagttccagaccagcctggccagcacggtgaaaccccatgtctactaaaaatacaaaaattagctgggtgtggtgacacgtacctgtattcccagttactccggaggctgaggcaggagagtcacttgaacccaggaggtggaggttgcagtgagccgagatggaggttgtagtgagctgagatcatgccaccgcactccagcctgggtgacaagagtgagactgtctcaaaaaaaaaaaaaaaaaaaaagcacagatgaagccttcattttcttgccactcctccatgattaaaataaaaaatattctattaattacatctctccctgtagtgagtacccctcttcaacgctccatttgagaacacagtacactaaaatcttgtttatatttctgtcttcagtcttgcctccagttcttgatttacccccttccaattaagctttcacctccaccattcctttgatccttttttcccagaggtaccagtgatctctgtgtttcgaagtccaattttgaatttcctatcctcatcttttcgtcttagcaacatgttgcacagctgatcattccctgttcttttttcttagctttgaagacatctctaagtttaattactttgtttcagatttttgtgttaccagtttcctctgctggtgtctcctgaagctgtcttctctgaatgtgggagtgtcccatgatttaggtctttttcatttttgtttttgtttttaagacacggtctcagtctgtcacccagactggagtgcagtggtgcaatcatagctccctgcagccttgaactcccgggctcaggaggtcctcctgcctcagcctcccaagtagctgggactctaggtgcataccaccacacctgagtaatttttttattttttagtacagactgggtttccctatgttgaataggcttggatctcaaaactcttctcatctcttttcacacacactacccttccttatcatctcatctcatggctttgaaccccatctacctgtctccatgtgccctgcagacctctgccctgaggtctagaaacctgtgttcagttgtcccctcacttctctgctgggacatctaacaggcatctccaccttcgtatgtgccactttctgaactcccccaaatgcattcccctgcagtcctgcacatctcagatgagggtgaccctgtacttcctggggcttagctgaacttgtcatatgttcaaaatatgtaagatgttacattgtaaatacattaatatatttttttttcgagacggagtcttgctgtgtcaccaggctggagtgcagtggtgtgatcttggctcaccataacctctgcctcccgggttcaagcaattctcctgtctcagcctcccaagtagctgggactacaggcgtgcaccatcacgcccaactaattgtttgcatttttagtagagatggggtttcatcatgctggccaggatggtctcgatctcttgaccttgtgatctgcccgccttggcctcccaaagtgctgggattacaggcatgagccaccatgcccagcctataagtacattaatttataacataaataattacatagttactaaaacagatgaggaaatttgttgtttctgaaattctttggaggtatgggagagaaatgttggtggcctcatccctgtgtgatctgcatcccaggacctctctgagctcatctcctccctgtgtccccctcgttccctctgccgcagccacacagacctctttcctggggccagggttgctcctgcctcagggcttccacctgggctgtccctctgcctggacatctctagcctgtcagctgcaggtgcaaacaccttttcttccccaggtctttgttctgatattaccttcttcatggagggttctgtgttcctctccaccctacatttaacactccagctacacccttacccctactgtggtccacattgcctgctctggatgtttctttctgctcttttgctgtccactacgtaaatcctggtaacaagacccaagggtagagcagagccagaaggtgggggtgtgctgggcttgccccgtctgagtggagctcacccctgttttcacattggagtgcagatacacatcttgtgcccccagcctcttacctgagattcccattcacatactcaggttgggcccagccttaatatttgaagttgattctacagtagtttctccttatctgccagtgtactttttgaggttccagttactcatggtcaaccacagtccaaggtattacgtggaaagttccagaaatgaagaattcacaagttttcaatttctcatccttctgagcaggatgatacaatctctcactgtcccactctgttttgtccaggacttgaatcatctctttgtcctgtatgtccccctgtatagtcatccctcggtatcacgtaggatttgcttccaagatccccccaagactacccaaatcagatgatcttcaagacccttatataaaattgcataatacagtcacatgccacataaggacatttcggtcaacagcagcccacacctgtgatggtggttccataagattacactggagctgaaaaattcccgttgcctagctacctcagagcagtcatgacatcatagtgcagtgcattccttgtatttgtggtgatgctggcggaaacaaacctagtgcgttaccaaacagctttaacctggatgtggaggaggatgacattgagaatctcttagaggtggttcatgaggaatgggttaatgaggagtcattggaactgatacaggaacatgtagctgaagaagaggcaagagaatagggaactggctgggcacggtggctcacatctataatccctgcactttgggaggccgaggcaggtggatcacttgaggtcagtagtgtcaggagtggtggcacatgcctgtggtcccagctacttgggaagctaaggtaggagaatcacttgaacccaggaggtggaggttgcagtgagccaagatcacgccactgcactccagcctgagcgacagagtgagactccatctcaaaaaaaaagaatgagccaataggaaactgaaggagaaaaagaaagtactctcaaggcaattcacagttaaagatatagcagaagcttttgcagaccttgacaagctccttaaaaggtttgaaaacataggcaccaacacctaaagattttcattaatagaaaggagcgtccatgatgcattatccgctcataagaacatttaggaagacaaaagaaacaaagcaagcaaaccaccatggacgtatttctgaaaggagtgacgcctctagaagaggctcaggcaggtccttcaggaggcgtctgggagaaaccattgttaccataggaggactttctggtgggagaagatgtggcactggaagacagtgacactgatggtcctgaccctgtgcaggcctaggctgatgtgtgtgtttgtgtcttagttgttgacaaaaatgtttaaaaaggttaaaaaaaaattaaaaacaagaaaaagtttagagaattaaggtacaaagataaaatatttttgtatagctgtacaacatgtttgtgttttaagctgttattgcaaaagaatcaaaaagttaaatttaaaagtttatacagtaaaacagttggaataagtaagcttagtttattacggaagaaaaaagtattttttgtgaagttagtgcagcctaaatgtgcagtgtttataaagcctgtagtagtgtacagtcatgtcctagaccttcacattcattcatcactcactcactcacccacagcaatttccagtcctccaagctccattcatggtaagtgccctagacaagtgtaccattttttaaactcttataccatatgactactatattttttctttctttttttttttttttttgagacagaatctcactctgtcacccaggccggagtgcagtgcagtggtgtaatcctggctcactgcaacctccgcctcctgggttcaagtgattctcctgcctcagcctcccgagtagctgggattacaggcacccactttcatgcctagctaatttttgtgtttttagtagagacggggtttccccatgttagccaggctggtctcgaactcctgacctcagatgatccacctgccttggtctcccaaagtgttgggattagaggcatgagccgccgtgcctggccttactgtaccttttctatatttagatatgttttgacttacgagtacttaccgttgttacagttgactatagtattcaggacatagcatgccctacaggtttttagcagtaggctgtattatatataccagatgtgtagtaggctatgctatcttggtttgtgtaagttccctctgtaatgaaatggtctgaaaatgcgtttctcagaacatgtccctgttattaagcgatgcgtgactgcatttgcatgtaacctatgcacatcctctgcaccctcccatatactgtaaacatctgattactggtaatacctaattaaatataaatgctatgtaaatgcttgttatactgggttgttttcttgtattatttttattgtattgctattttatattggtatattgcttccttttgtcttttttaaattatttaagtctgtaattggttgaatccatggatacagaccccatgcactgtatactctgtctgcccatcaatctgttaatagtcttcttttttgttttgttttgttttgtttttaatagtagtctttttgatcagatccaattttgtggtacctcattggttttgtttaagtgatccttattttacttaacatgccccccaagcacatgagcattgatgttggcaatttggatatgtcagtgagaatctgtcacaggcatcctttaagtggagtaaatagggttcagtactgttccaagtttcattcactcagggttttgcaacgtatccccttggataaagggattttactgtattctgtatccagcattgagcaccgaagccgtgttctcatttctgaaggctgagttcagcctctgattcacaaagaggtgagggggtgctgtgctctgcatggggtttggtcagagccaggtctgtgccctgaaggggagcttagtccagcccagctccccactgctgcagtgtgtgtgtgggcttctccaggaggggagcgggttctgaagaaaggggccaaaagctcacttgttcttcctgtaggagtttattgtcccggcatcaactctgatgcagtgggcagcagaggaccgtatttccacagggtgaggtcttccctgcgtgtgtggttgtggcacaggaagaaagtatgttgattctaaaccctaaacagcatatttttgacattcaggattgacttctaaagagtcatgttggccgggcgcgggggctcatacctgtaatcccggcactttgggaggccgagacgggcagatcacgaggtcaggagatcaagaccatcctggctaacacggtgaaaccccgtctctactacgaatacaaaaaattacctgggcgtgttggcgggcacctgtagtcccagctactcaggaggctgaggcaggagaatggtgtgaacccgggaggcggagcttgcagtgagctgagatcgggccacggcactccagcctgggtgacagagtgagactccgtctcaaaaaaaaacaaaaaaagtcatgttatgtgaaggagaagcccagaagaggaaagcagaggagtcaggcatgccacttactcaggtaaagtgatattctcagtagattgttctgtttcttatttcttcctgaaatgccgggtgctggagttgagaatcttctctgagtctgaagcatcctgcctgacaggtttgctcacactcacccatgccttccttcagtccctctcatctcgcttagattccatctcttgtgacccagtgacatgaacttgggaagaggctgcactgggcgtgatcctgggaagggctcacacccagacgtgggtggagacggggtgagggccccgtggtgtcagtgctgttgggcagcagggattgttcaggggccacatctggatgctctgtcagctctctgtggaccaggattagagaagctgcccacagaaatcacctattaatgtgcacaagtacctggtaaattctgcaataaaaattcaggaaatcttttctgccttttttttttttttttggagacaagagtcttgctctgtcgtccaggctggcatacagtggtgcaatcttggctcactgcaacctctacctcccaggctcaagcagtcctcccacctcagcctcttgagtagctgggaccacaaatgtgtaccaccacgcccggcaattttttgaatttttggtagagatggggtttcaccatctccacccacctcagcctcccaaagtgttgggattacaggcgtgagccatcacgccaggccttttctgacttttagtaatagccattctgactaatgagatggtatctcattgtggttttgatttgcatttctctaatgatcagtgatactgagctttttttccatatgcttgttggctacatgtatgtctacttttgagaggtgtctgttcatgtcccttgcccacttttttcgtttgtttgtttgagatggaatttcgctgttgtcgcccaggctggagtgcaatggtgtgatctcagttcactgcaacctctgcctcccgggttcaagcaattctcctgcctcagcctcccgagtagctgggactacaggcccctgccagcacactcagctaattgttgtattttcagtagagacggagcttcaccatggtggccaggctggtctcggaacttctgatgtcaggtgatccaactgcctcagcctcccaaagtgctgggattataggcatgagccaccgcacctggccctttgcccactttttaatggggttttctcttgtaaatttgcttaagttccttgtagatgctggatattagacctttgttagatgcatagttcgcaaaaattttctcccattctgtaggttgtctgctcactccgttgatagtttcttttgctgtgcagaagctcttaaagttaattggatatcacttgtcaattgttgtttttgttatgattgcttttggtgtctttgtcatgaaatctttgcccattcctgtgtccaggatggtattgcctaagttgtcttccaaggtttttatagtttggggttttacactgaagtctttaatccatcttgagttgatttttgtatatggtataaggaaggggtccagcttcaatcttctgcatgtggctagctggttatccagcaccgtttatgaaatagggagtcttttccccattgcttgtttttgtcagctttgtcaaagatcagttggttgtagatgcacggccttatttctgggctgactattctgttccattggtctttgtgcctgtttttgtaccagtaccatgttgttttggttactgtagccttgtggtatagtttgaagttggataacttgatgcctccagctttgttctttttgctcaggattgccttggctatttaggctcttttttgattgcatatgaattttaaaatagttttttctagttctgcaaagaacgtcattaggattagctttcaatctgtaaattctttgggcagtatggtcattttaattatatcgattcttcttatccgtgagcatgggatgtttttctgtttgtgtcttctctgatttctttgagcagtggtttgtaattctcactagagaataaattttaatggacaaagcaatgggttagtgcagtagtataagcctataatttgagcttcttgggaggctgagatggtaggatctcttgagtttgagaccaccctgggcaacatagtaagacctcacataaattttaaaacatattatatttatatatttgaaaataggtatttgtgactggagttcaagtttctatgttttttttttcatgatttaccttttcttttttttttttttttttttttttgagacggagtctcactcttttgcctaggctggagtgcagtggtgtgatctcggctcagtgcaacctgcatctcctgggttcaaacagttctcctacctcagcctcccgagtagcttggattacaggtgcccgccaccacgcctagctaatttttgcatttttagcagagacggggtttcaccatgttggccaggctggtctcgaactcctcacctcaggtgatccgcccgcctcagcctcccaaagtgttgggattacaggcgtgagccaccgctcccagctggtctactttttttaaatagcttaatatacaataatgtttataaactaaactgagtactatttatacatttttattgttgcaaagatgctgaaatacacattagcaaaaataataatgactgccaggcagtatgtgcaccgttagccccagtttcttgggaggctgaggagggaggatcatttgagatcaggagttcaaggctgtactgtgctatgattactcactgtaccccaacctggacaacatagcaagacccagtctctaagaattttttttaaaaaagatgacaaatatcatctaaaaaataggtcattgagagacaactccttatttcatctgatgtgtaaattgtatatgtgtattactttataaactaagtgtgtgtaagtgtatacatgtgatgtgtttgcatgagtgcatggataagcaagcctatagttaagctacaacatcattttataagaattttttaattttaattttaattttatttttcatttttttgaaactgagtcttgctctgtcgcccaggctggagtgcagtggcgtgatctcagctcactgcagcctccgcctcctgggttcaagcggttcttctgcctcagcctcccgagtagctgggactacaggcatgcaccgccacacccagctaattattatatttttagtagagacaggtttcaccatgttggccaggatggtcttggtctcctgaccccatgatccacctgcctcggcctcccaaagtgctgggattacaggtgtgagccaacacttttggccgtgcgtgatggctcacgcctgtaatcccaacactttgggaggcctaggcgggtggatcacctgaggtcaggagttcgagaccagcctgaccaatggagaaaggccatttgtactaaaaatacaaaattagctgggtgtggtggcacatacctgtaatctcagctactcgggaggctgaggcaggagaatcccttgaacctgggaggcagaggttgtggtgaaccgagatcgcaccattgcacttgagcctgggcaacaagagcaaaactccatctaaaaaaaaaaaaattatattttgaacagttgaaattacatctgaaatacttgccatgaccttataagtgttctacactattgggccgggtgcggtggctcatgcctgtaatcccagcattttgggaggccgaggtaggtggctcgcatgaggtcaggagttcaagaccagcctgagcaacatggtgaaaccttgtctctactgaaaatacaaaaattagccaggtatggtggtgcgtgcctgtaatgctagctgctcgggaggctgaggcaggagaattacttgaacctaggaggcggaggttgcagtgagccgagattgcgccactgcactccagcctgggtgacagactgagactctgtcaataaaaaaaaatgtgttctacactatcacgttaatgagttaatggcagtaagaatagtaatgtattatgaggaggatacatgtgtatgcatatagaatgaccttttacgcagattcagatttttgtccatgaacttaactttactcagttaggtaattgtcagtttacttttaatgctgatctgttacttaactgcttgattctttaggtttgattctaatgcccagacacaaaattaacccacaattctatagaagtgttaggtattatgttcgacacaccaagtgatattcattgtctacctgagctagaatacaagtagttggcgtcttcagagacacttgtatgctagctcaggtagatattgaatgaaaaatctacactagtttaaagaatatcataactttttatggaaaagtataataaaactcaatcacagacacataactagctcaaaaataccttaatgtggatatgtcagaatgttcacgtcagcacttcagttgagtcagtccttacaaccctcttctcatttcgtgtgaacataattactctctccttaccctgttggtcaaatacatcttttattttagggacacttgacattcagggacgtggccatagaattctctcaggaggagtggaaatgcctggaccctgtgcagaaggctttatacagggatgtgatgttggagaactacaggaacctggtctccctgggtaaggataatgcccctccagaagttggggtctgcccttagtatctctgcattttcccttgtgtgcctcttgggagcccctgcattgcttgactgagattgaaaccctgttgacttggctgggcacggtggctcatgcctgtaatcccagcactttgggaggctgaggtgggtggattgcttgaggtcaggagttcgagaccaacctgaccaaaatgataaaaccccatctgtactaaaaatacaaaaattagccaggtgtcacggtgcatgcctgtaatctcagctacacgggaggctgaggcaagaagaattgcttgcacccaggaggcagaggttgcagtgagctgagatcatgccactgcactccaacctgggtaacagagcaagactctgtttcaaaaaaaaagaaaccctgttgactcagaaatgaaaagctcccgtatgctttctggtcttgaaattccccctttcttcagacattctgtatccttcatgatacacctttgggtggtacctgggcttaagtgtgcataaaaccttatgacaaacttttaaaatatccagttccctgttttctacccctgtgcttttgattctatagttcttggaagagagttcgatgtccaattattacacagttccctacgcattcagaagcagacagtctgtgggtgaatttgtgaaatgtttttcttgaattcttgattagtttttttatttatttatagtagaatgacttataatcctttgagtatatacccagtaatgcgattgctgggtcaaatggtatttctggttctagatccttgaggaatcgccgcactgtcttccacatggttgaactaatttacactcccaccaacagtgtaaaagtgttcctgtttctccacagtgtctccagcatctgttgcttgctgactttttcatgatcgccattctaactggctttaaaggattaatttttaatatcatctctgctgcctaaacagagggcttggattttggagacatcacagcacatcttgattctttcttttataaacaggaatctgtcttcctgacctgagtattatctccatgatgaagcaaaggacagagccctggactgtggagaatgaaatgaaagtagcaaaaaatccagataggtgggaaggtatcaaagatatcaacacaggtaagagctcagatggacagagtgaaagccacacttttttttttttttttgagacagtctctgttccccacactggagtgcattggccatcatagctcactgcagctttgaactcctgggcttcaacagtcctcctgctttggcctcccaaagtgatgtgattataggcatgtgccccttgcctaccagagccacactattaaatcgtgtttataagtgggagaattgtgtggagaaataagagtttaaaacctgtgagttcttaagagaaatctttctttacccccacctgtcaccatgtcctttatgtatgtatgtatgtatttattcatttatttattttgagatggagtcttgctctgtctccaggctggagtgcaatggcgtgatctcagctcactgcaacctccgcctcccgggtacaagtgagtcccctgcctcaacctcccaagtagctgggattacaggcgtgcgccaccacgcccagctaatttttgtatttttagtacagacgaggtttcaccttgttagccaggatggtctcaatctcttgacctcgtgatccgcccgccttggcctccgaaagtgctgggattatggtgtcagccaccgcgcccagcccacgctgtcgtttagatgtgtaatagttttatgtttttgccctgcagtgttactgcagcccaaacagaggcaaaagcaaaggcttttatcatgatggacaataccctgtcatgtggcttctgtcaactctttagtccttgattctgagggtcacagagagcgctgcttcaaaggagtcccttttccctgtggtctcttcctgtatgggattttatctgatgctcagttctctgtccttatacatcagagctgaggtctgcatagacctgcctccttgacctattcatgatctgcccatttcctgtactgggaagacctgatggggagatgggaaaacacaggctgctgtcttttgcatctgggtcctggaaactgcatggagctgtttcaagccctctttgcctgttcagttctgtttgaggtgggaaaaagtcagtgattttcctactctcacatgctacttggcacagaatgcttcatttctggtcaccaaaatgtgtggagatttctccccaccagcaaccagttttggggtttcctgcaattcattggtgacactatctacctgagttagagtcgcgtcccacaggctaagggttgagttcccaagcctgtccgccaccaattgccagtagcgggttgtcacctttccatctgaccaaccagccacaagtcagggttccctcgacccccttcttctgtttggttactttgctagggtggcttacagaactcagtgaaacacttcgttatgtttattggttcatgaggaaggatgtttccaaggatacagatggacagccagatgaggagattcacaaggcgaggcacatgggaagattcactgggtgtgccgcccttgaggcccaccgcacgtgttcagcatgtggaagctctcaggaacttttatggaggcttcattacttaggcatgattggtattaactcagtctccagcccctgtacccttcctggaggatggtggttggtgctgacaattctgtgcttctaaccatggcctggtctttctgggctttctatacctgcagatatagaaaccatggatatgaaggccaatagtaagggacttgagcatcacacattttggtatctcagggttttttagcacaaaactcgcaaaccatgtttttcctctgctctcacaccaccacgacaattatcaacacagaagaagacttctctgaccaaaggtgtggggggttttccccatacaccaagcagcagacagcagctgggtgtcctccaactcacttccaacactgtatctggagatagggccaggtcccacaggtttagggctcagtctccaagacttgccccccttcccaccagttgcaagtctgggtctccaaacttctgaccaactggcttccagttgaggtttccacaatcccatctttgggcccaattagtttgctagagcagctcacagaagtcacagaaacactcaggtttaccggtttattatgaaggatattgcaagggtacagatgaagagacatgtgggacaggtatgggggaaggactgtggagcttccaagccctccctgggcgtgccactctccaggaagccgccatgtgttcagacatcctgaagctcttggaacccagtcctcttgggttttcatggaagctttgtgacatcagcattccttcccccagggtatacagcaggaacctctctggggaggtcttaagacccgcaatcagaaaggtagggggaaagttagagtcctgccttagggcaggtgaaagaagaggaggagaaggttggagaggttatttttcttaaggtctgcagagaaggtctaacccaacattatacccaaagactgtagcaagggctatgggagttatgagccaggaactgtggacaaaaaccaaggtatatgtgtatcataacaccacacagaggagcctggaacgtgtcctccctggataccaagggagggattctgaatcgaaataatggatgtgcacccagtcagtaatcaatgaaagagagttaataagcacaagtgggtaccactgcatttaaatgatataagaccagagagtcaagaaagacctggatcccggaagagctcaattaaaaaaaaaaaaagaaagaaagaaagaatccaagtgggcttttcccccctaattataaaggaaaagccttcattctttcaatattgagtatgatgttacctttcggctttttatatatggactctattatgttaagtaagttcctcgtattcctagtgtgttgagtgtttttctttcttttttttttttttcttttgggggagtgtctcatgctgtcctgatcttgaccttggctcactgcagcctccacctcccaggctcaaacaatcctctcacctcaaccacatgcctggctgatttttgtattttttgtagaggtggagtttcgctgtgttagccaggctggtctggaattcctgagctcaagcgatcctcccgccttggccttccaaagtgctaggattacaggcatgagccaccgtgcctggcgagtgtttttatcataattgctaaggtttttcaaatgtttttctgcatcagctgagattattgcatggatttctttttctttattctgttattgtgggatattacatagactaatgttccaaagttgcatccttcttgcattcctgaaataaatcttacttggtcatgaggtgtgatccattttaatatgctgctgaatttatttagctaccattttgttgaggatttttgcattagattaatcaggaatattgctctgcagttttgttttgttttgttttaagatggagtctcactgtggcccaaggtggagtgcagtggcttgatctcggcccactgcagcctctgcctactgggctcaagtgcttctcctccctcagcctcccaagtagctgagactacaggcacctgccaccatgcccggataacttttatattttaatagagacagtgtttcactatgttggccaagctggtctcgaactcctgacctcaggtgatctgcctgcctcagcctcccaaagtgctgggattacaggtgtgagccaccgtgcccgacctgctctgcagttttctttttttttttgagacggagtctcgcccggtcgcccaggctggaatgcagtggtgtgacctcggctcactgcaacctccgcctcccgggttcaagcggttctcctgccccagcctcccaagtagctgagattacaggcgcgtgccactacgcctagctaatttttgtatttttagtagagacggggtttcactgtgttggtcaggctggtcttgaactcttgacctcgtgatctgcccgccttggcctcccaaagtgctgggattacaggcgtgagccactacgcccagcctgctctgctgttttctttagggcctttgcctctgctttcaaggtaacactggcctcattgaatgtgtgtagaagtggttcacctcctcaaccttacggcagattttgaggattggtgttaaatcttttttcaatatttgatagaattttacactgaggtcatctggtccattgctgttttagttggtaggtatttaataactgattcagtcttcttatttgttactggtgtgtttagattttctacttcattgttaagtcttggtaagtggtgtctatctacaaatttatccatttttttcttggttaacatattttttgttatataattgttgagtctcatttaatttccatttttatttgtgtagacttgtttgtaatgtcctcttttacctttctaattgtagttatttcggtcgtatgcttcatgtttcttttttctagtttaggtaaggctttgtcaaaagtcttacccaaagagtgaactcttactttcctgactttctctagtgcttctctgctgttttctttgttttctaacctttattttttctttctgctatcttagtgttcatttttttctttttctttttttttttgagatggagtcctgttctgtcgcccaggctggagtacagtggtgtgatctcggctcactgcaacttccgcctcccaggttcaagcaattctcctgcctcagcctcccaagtagctgggactgtgagcacatgccaccatgtccagctaattttttgaattttagtagagacggggcttcaccttgttgcccaggctggtcgcgaactcctgagctcaggcaatccacccgccttggcctcccaaagtgctgggattacaggtgtaagccaccgtgcctggtcgtgttcatttttttctttattgagatataaagttaggttgtttatacgttatttcattgtagtttagttatttagtttttaagagatagggtctcactgtgtcacttaggctggagtgcagcagcatgatcatagatcctggaatccagtgatgatctcactttagcctcctgcgtagttgggactacaagcacacgacactgtgcctcactaattaaaactaatttattttattttatttatttattttgtttagagataaggggtctcactttgttgcctaggctggtctgcaactcctggcttcaagagatcctcccacctcagcctcccaaagtgctgcgattataggtgtgagccaccacacccagccgttttttttttttcatgtatgcatacatcattacaatatcccttccagcactatttttattgcatttcatgagttttgctgtgttatatttacattttcctttatatcaagatatttcctaattttccttttattttatttttatttatttacttttatttatttattttgagatagagccttgctctgtcacccaggctggagtgcagtggcacgatctcggctcactgcaacctctgcctcccgggttcaagtgattcttcttctgcctcagcctcctgagtagctgggattacaggcgcacgccaccacacctggctaattttttttatttttttatttttagtagagatagggtttcaccatgttgatcaggctggtcttgagctcctcacctcatgatccacccaccttgacctcccaaagtgctgggattacaggcgtgagccaccgcatgtggtttttttttttttttgaaacggattctcattctgtcactcaggctagagtttaatggcacagtctcagctcactgcaacctctgcctgccgggttcaagcagttctccggcctcagcctcctgagtagctgggattacaggcacacaccaccatacccggctaatttttgtatttttgggtggagacggggtttcaccattttggccaggctggtctcgaactcctgacctcaagtgatccgcccacctcgccctcccaaagtgctgggattacagccaccacacctggcctatgcagctgctcataagtgtcttattttccctaagagactcatcctgctttttcttagaagctttcaatttctgttgtatttctctactcataatccctctcaaactcacctgtaatcctcctgagtcctgtagattccccattgctccattgcatcaccctaccttttgggttttctccactgccagtgtgatactatgctgatatttcttccagtgtctgaatcagatgaggcagattccagttcctccatcagggtctatacatgccagagtccgggcgcggtggctcacacctataatcccagcactttgggaggccacggcgggcggatcacgaggtcaggagatcgagaccatcctggctaacacagtgaaaccccgtctctactaaaaatacaaaaaaattagctgggcgtggtggcggacgcctgtagtcccagctacttgggaggctgaggcaggagaatggcgggaacctgggaggcggagcttgcagtgatccgagatcgtgccactgcactccagcctgggtggcaaagccagactccaactcaaaaaaagtgcaaaaaacatgccagaaccatgggttcaaattatactctttacttgctttcctagggaggagctgtgcagtgagaagcaaagcaggaaacaagcctattacaaatcaacttggattaacctttcagttacctctgccagaactggagatatttcaaggtgaagggaagatttatgaatgtaatcaagttcaaaagttcatcagccacagttcttcagtttcgccacttcaaagaatttactctggggtcaaaacccacatatttaataaacataggaatgattttgttgattttccattgctgtcacaagaacagaaagcacacattaggagaaaaccttacgaatgtaatgagcagggcaaagtcttcagagtgtcttcaagccttcctaatcatcaagtaatccacactgcagataaacctaacagatgtcatgaatgtggtaaaaccgtcagggacaagtcaggcctcgcagaacattggagaattcgtacaggagagaaaccttacaaatgtaaagagtgtggcaagctcttcaatcgaattgcataccttgcacgacacgagaaagtgcatactggagagagtccttacaaatgtaatgagtgtggcaaggtcttcagtcgaattacataccttgtacgacatcagaaaattcatactagagagaaacctcataaatgtaacaaatgtggcaaggtttatagtagcagttcatacctagcacaacattggagaattcatacaggagagaaactttacaaatgtaataaatgtggcaaagaatttagtgggcattcaagcctcaccacccatctgttaatccacactggagagaaaccttacaaatgtaaagaatgtgacaaagcttttaggcacaagttctccctgacagttcatcagagaaatcataatggagagaaaccttataaatgtcatgaatgtggcaaagtcttcactcaagtttcacatcttgcacgacatcagaaaattcacactggagagaaaccttacaaatgtaatgagtgtggcaaagtcttcactcagaattcacaccttgcaaatcatcagagaatccacactggagagaaaccttacaaatgccatgtgtgtggtaaggtctttaggcacagttcatggtttgtacagcatcagagaagtgttcatgagagagtccttacaaactgagtttggcaaactctatcataagttctagcagtaatcaacatccgagagtctatactagaaagaaatcatttaaatgtactatatgtggcacaggctgtatcgagacctaccaaatcactagacatcgaaacattcatctttggtgaaaccacacaaatggattgtgtgtgccaaggccaacaagtcaaaatatgttgaacctaatgatatgatgtgtataaagggtgcaaggacacgtggaaatgatctgtaatattcgggttattaaaaatgtaattggctgggcgcagtggctcacacctgtaatcctagcactttgggaggttgaggcaggtggatcacaaggtcaggagtttgagaccagcctggccaatatggtgaaacaccatatctactataaatacaaaaaaattagccaggcgtggtggcacatgcctgcaatcccagctactcgggaggctgaggcaggagaattgcttgaatccaggaggcagaggttgttgcagtgagctgagatcgcgccactgcactccaacctgggtgacagagcgagactccgtctcaaaaaaaaaaaaaaattatttgggtttgaaaggccaggggcagtggttcatgcctataatctcagcacaatagaaagccaagacaggagggtcacttgatgcctggagatcaagataagtatgggcaacgtagcaaggcccatccctacaaaataaaaaaaataagccaggcccttggcatgtgtctgtagttccagctactcaagaggccgaggcaagaggattgctcaagcccaggagtttgagagtttgagcagtgagctctgatcttgccatttgtactccagcttgggtgacagagcgagaccctgtctcaaaagaaaaaaaaggctagtttttatgacttcaacctgaactttgaaatttcttcatgtgccttccctacaggcctttcactgtggtctgggaaagaatcagtaagatgacagggctgacttcattagatgaggagcgtttctatccagtttcctggaggaataaggacactgccttttcagattaaagattgtctgatttagagaccatggaggtggacagagaataacaaaaccgtgatggcagtcatcatgcttattgcagttagcacacacttttcctgacaggcacagtgctgctgtgctctacaaatgaccatgaaatagagcacgccatgactttaggacacagggatttttatgggaagagagttcatcagggactgattacgtaggagagacgatgcaggggaaatggtggccaccgtctccattgaatagcaatagctgctgtttagcaaagactgattaaaaagtactctgatttttcaaatggaagagagaacagttaaatcagagtagagagtttaatcaaaactaccagtggaacatgttcttgagtaggattcacatttaactgctggcataatttgcaactgttggattttctcatgtttggaacaataaagttgaaattttccaaagtgtgaatgatttaccttctttctaccaatattgttttatctcgtctcaggaggatactttatagcagacaataataaggcaccattaggatttttaaattaatttatttttaaaattaaagttctagtgtacatgtccacaacatgcaggtttgttacataggtatacatgtgccatattcgtttgctgcacccatcaacttgtcatttacgttagatatttctcctaatgttatccctctgccagccccccaccccccgacaggccccggtgtgtgatgttacccgccttgtgtccaggtgttctcattgatcaattcccacctatgagtgagaacatggggtgtttggtcttctgtcactgtgatagtttgctgagaatgatggtttccagcttcatcaatgtccctgcaaaggacatgaactcatcctttttatggctgcatagtattccttttttttttttttttttgagatgaagttttgctctgtcactcaggctgaagtgcaatggcacgatcttggctcactgcatcctctgcctcccgggttcaagtgattctcctgtctacacctcccaagtagctggattacaggcatgcaccaccatacccggctaatttttttgtatttttagtagagatggggtttcaccatgttggccaggccggtctcgaagtcctgacctcgggtgatccagccacctcgggttcccgaagtgctaagattacaggcatgagccacggcgcctggccaggatttttaaggttgaagcatccacaacaattttgtgtgtgaaatgaaatgacatgcacttttgggtatatacacttgggtaagtatgattttgggtaataatacttagtacttaagttattctctctactctttgtttttgttttttgtttgttttgttttgttttgagatggagtttcgctcttgtttcccaggctggagtgcaatggtgtgatctcggctcaccgcaacctccgccttccaggttcaagtgattctcctgcctcagcctcccgagtagctgggattacatgcatgtgccaccatgcccagctaattttgtttttttagtagagacagggtttctccatattggtgaggctggtctcgaactcctgacctcaggtgatctgcccacctcggcctcccaaagtgctgggattataggcatgagccaccacacttggcctacctctctactctgccctaagatgcttttgtgggtaaagtgaaaatcacataacagtgcagcttcatcatcatatgccctcaatgttcatcactgttgataaacatgcactgtattatgtttctgtgtgcctttttcttgtgtgccaagtaagacccatggcaggcaccttcattttcaggaagcgaaaatacagatacagtaatatggaaaataggacaaagtgtggacttcaggatgaaaatattgtaacaatcttgctgttgacctcgtagcgctcagtgacataatttgaaaaaatattaatgttcagaaatgttctcttgaggatgaacacacagattgggaatttcgttttgctttggtagattaactagaaacttcacattttcacccttataacctttttggtaatttgaacttttgatcattcttctggaactgctttgacatccacctgaagtttggtttgggtattgagaatgatgatgccattcactaatgtgatctcaaaatgtttactccataatgaggctttctggggagagcagggtagacttccccggttggtccaaatatgactagggaatcggcataggtgactggcttggggtatgatgattgttaagggatagggcttgggcaggggtgcccacttgtggtttgaactttcagctggtgccaaaggagtgggcactgaggatttttcagttgaccagatgggcagaataggaagagggagtgcagaggtgtaaaaggcgttggtgttcagacatcacaaaatgcagtcaactctaggacaactctagcttcctctggaagctcctgccatcttggttaggaaagactctgattttcttcatgataatatcttacgttccttttatagttacagatacaggtctcattgcacaatatgattgttgaaaacacttgtgaaatttttttagtaaaattgcctaagatactttttatagtagacaatgaaaattagtgtgtgggtttataataaatataatgtattatataatatgattaaaatatatttgttataaatatgatattactagaagagcatttttccaaaagctatggaaatgtcattttcccgttacagcatcaagcaatatattccatggttcattttcaactctaataaaattatattttgtgtttatatatgcacgtatagacacatatataatattttttttttacttttttctttttctgtacattgcatccagatgctatgcttgtttgtttttttttttgagacagagtcttgctctgtcacccaggctggagtgcagcggtgtgatcttggctcattgcagcctccgcctcccaggctcaagtgattctcctgcctcggcctcccgaatagctgggattacagacatgcaccatcaccacacctggctaatttttgtatttgtaatagagatggggtttcaccatgttggccaggcatggtcttgaactcctgacttcaggtgatccacccgcttcggcctcccaaagtgttgggattacaggcatgagccaccatgcccggccagatgctatgcttaatacattttttccgaatgtcactctagtgaaaattttaggggacacaaaaatgagactgttgtttggagacaatattttttgacaagagtatgcacaagacaatggcaggtataaacgttttattgtaaatatgaaaaaggaaaaaatgctttcactatattagaggacttgaagtaacgtgaagtgattccaaccctttatctttattttatttatttattttattatttatttttttgagatggagtttcactcttgttgcctaagctggagtgcaatggagtgatctcagctcactgcaaccttcacctcccgggagcatgctgctctatcttttttttcagatgtttgagctattccaggttttttgggatttctgttggtttgttttgttttttgcttttctacataattgtttggataatcttgtcagtatctacgaagtgccttgatagtaaatatattaaccctgtgtatcaatttggggtaatttcacatttttttctatgttgagtttatcaataaattgatattgtatatgtctctatctgggtgtctttgatttctttcatcagcattttgtagttttaaaatcctgagaatgttaaattaacatattttttgactttttttttttttttttgagacagagtcttgttctgttgcctggtctggagtgcagtggcacaatctcagctcactgcaacctccgcctcccaggttcaagcgattctcctgcctcagcttcctgagtagctgggattacacgcgtatgccaccatgcccagctaatttttgtatttttagtagagatggggttttaccgtgttggccaggctggtctcgaactcctgacctcaaatgatccacctgccttgacctcccaaagtgctgggattacaggtgtgagccacctcgcccggttaatgcttttttaaaaccaacaattggtgacctaaattctcactggccttagccctccatgcccctggtgctgtcactagaaaactctctggagctgagcacagggttacctctgtccctcccgaaagaacagggaatagaaaaggagaggatttctattctgctttgtgggccgtcagcatgaaattgcacattctgcccaggcagggctttgcagttcatgtattaacttgcgtcgctttcacagacaatcccagggcttaattaaattgctaaatttagttttttatgtatttatttgagagactgagtctctgtcgcccaagctggagtgcagtggccgtcataactcagtgtaaactcgaactcctgggctcaagcgatcctcccgcctcagtcttcggggtagccgggactacaggtgcccgaccgcacggtcggcttaagattaactttaatagcaggaattttcctggatctaatcattagccgactttgctcagtcccggcaagagtacagttccgagacagctgagttgctccagtctccttgacaggtctccccggcaaaacccggaaaacagaggcactggaagcgaggcggagggaagcgcaagccccactccgccccgcccccgcccccgcccccgcccccgcccccgcccccgcccccgcccccgcccccgcccccgcccccgcccccgcccccgcccccgccccgctcggacccctccgctgcgcgcgcagtttcccacaaacccggaagcggatcgcgtggagtgaaggtcacgccgcggcgcgtgagtttccctttgtgtaaattaatctgcgcttcccaactcccccgcgcttctgtacccgggatctgaggggccacacagaccttgaaatcctcgcaccgctccctctaccccgaccaaattcaggcgtctccgtgagagtcaggcggtcgcttccctgtgtgtttaaatcgctcggcggcgggtcctgtcccccgtccttctgccacagggccatgtagtcacctcctgtcgcggagttttcctgtttcaagtccttcagtgatgcttacatccgccccgcacagcgtaaagtcctcccccgctaggcggattccggtctatgcggtcccccaagcctcgcctttgttggccctggagcacagcgctccaatctcaatccaggagaagccgcgtcttctgcccagtgctgggattctgcagacgccacccatctcttgatccagaccctacctttaccctccttgatacggggccccgctactccccaggcctcctcttcccagacaccgcttctcctaaccctgcgtgtggggaggtgacttactctgtctcttgacatccagtgttcttgcgggccaaataacaccccactgaaaaggtgttctgcttgtggacatcggatcccaattccttccatgtgaatgtgtgcagaaagagagacggagagcgagggagaagaaagagaaaaattttgaaggagaaaagaagattgagggagagccgtaagcagatggcaaagtagagagtggatggaggatttgcagagacagcgaatgaagccgagaaagtagcagggggaaaaaagcaactggagaaatgcagagaaaagttccatctccggagagatgaaggacagcaagatagtgagaggggcagcaaagtgggaagttcctcagtttgagagtgggggagagggggagggatttggagccagggcagacagagcagcgtggtgctgggacagcaagaggagtcagctggtgacaacgagagcagagggagaaccacagcaggtggaggcctgggatctcagggtgccagagagtggggacaagggggtgtaacagaaaagaagggatttaacagagagagcagagggggagtagagtcaggggaagaggcaagaccgggcacagtggctcacgcctgtaatcccagcactttgggaggccaaggtgggtggatcacgtgaggtcaggagtttgagaccagcgtgggcaacatggtgaaaccccatctctactaaaaatgcaaaaattagccgggcgtcagcgcgcgcgtgtaatcccagctactcaggaggctgaggcaggagaattgcttgaacccgggaggcggaggttgcagtgagctgagattgcgccattgcactccaggctgggcgacaagagcaaaactccgtctcagggaaaaaaaaaaaaaagagacaaataggtggagaatgggatgatcaaagattgagcagaaagtttggaagaggggtgaaacaagttgccagaatggagcagaacaggtggaagagaaggaatagaaggaagaaggggagaaacatcaggagaagagaggggctcaaaatgagcagaatcttaggggaaaaataaagggggaaaaaagctagagaaagaaggtgagaatgagagatacgtacagaatgagggagggaaacacagtacccagaaaagagggaaccctgggtgcagatgaacggtgagttgattggatattatgattaagttgtgacattgatttatctatttataatttgataatatgaaatatactttaaaaatacagatgaaaatggatatgcaaaactcctgtctgtaaggctggtgcattttataattcttggcatcagactttagcttccactcacattccctattcaggcacaggtcagtgacttgagtcattcaggtgtgggtcacccactttccttttcctgggatggggtagggtgtgggcgagtgtaaaagatagcaggaaaaccaaagtgtttttcctactcttgcagtcaacacaatagtgaacactcaacacagaatgcttcatatctgatgaacaaaatgtgtggggatttcttcccaccaacaagcaattcgtcagacaccgcctgggtgatccgtaatttcagtcaagttgacactgtctacttgaagttagcatcagatcccacaggttgggggctcagttccacaaggctgccgctacttcacgtgctggttgtaagttcctggttgggacctgaacttcaaccaaacatctaaaaattgaagattcccttgaccctttgctcagattttattaatttgttagcctcattcacagaactcaaggaagcattttgcttagttttacccatttgctatgaagaatattgcaaaagatacagatgactagcccgatggaagaaccctcctagcaaattaatcaaaagaaggggctttgggataccctgattttttttttcttttgttttgttttgagacagagtttcactcttgttgcccaggctggagtgcaatggcatgatctcagctcactgcaacatccatctcccagtttcaagcatttctcctgcctcagcctcccaagtagctgggattataggtgtgtgccaccacgcccagctaatttttgtatttttagtagagacgaggtttcacaatgttggccagggtggaataaatggagttcagtactgtttgaagttccaggcatccaatgggggtcttgggacatcttccccatggatacggggattccagtgtgttctgtctctggtgctgagcaccaaggctctgtgtcctccatttctgagggattacatgagcctgggatccatagagaggagaggaggggctgtgctctgcatggggtttggtcagggctgggtctggccctgaaggggagcttagaccaggccagctccccactgctgcagcgtgcgtgtgggcatctctaggaggggagcaggttctgaagacgagtaaaaaactcacttgttgttcttcctgtaggagtttcttgtctctgcatcaactctggtgcagtgggcagcagaggacatctttccgcagggtgaggtctaacctgtgtgtgtgattgtggcacaggaaaagggtgtgttgattctaagccctaaacagcatatttttgacatttaggattgacttctaaagagtcatgctgtgtgatgaaaaagcccagaagagaaggaagaggaaagcaaaggagtcagggatggctcttcctcaggtgagatgatattctcggtggattgttctgtctcctttctttcagaaacgctgggccttcgagttgggagtcttctctgagtctgaagtgtcctgcctgacaggtttgctcacgcttacctatgccttccctcagtgccgagaccagcttggtcgtggggaccctaacctagtggcactagaggaattaaagacacagacacaagaatagagtgtaaagtgggatcaggggccaacagccttcagagctgagagctgcgaacagggtttgacccacatatttattgacagcaagccattgataagcattgtttctatagattatagattaactaaaagcattccttatgggaaacaaaacattcttagcaaggagtagagaaacagtctttggctaattatctgcagcaaaaacgtgttaaggcacaggccactcatgctattgtttgtggtttgagcagttttccactccgggcaggccaggtgttccttgtcctgctccagtaagccaacagcttctagcagtgtgtgtcatagccatcacaagcacgtttcattgctgcaaaaatcctgcttatggccaatttctttaaagcctgttgccagcatgttcccctttctgtttttgcaaagtgacaaaggcaaaggctgctttgtcacggtgggctacttctcacaggattcgggattcgggatttggatctgcatgctacacaaagacaaacaacacagattaaaagcacaatcatcattgaaatcagggagcctccaattgtcttgatccattttaacgggttaatagctgctaatctgtctgcagctccttcaagctctttagttcctggcattagcatcagatgtgcctgagaggcttggaatacttgttccttcagttttgtaatatctaaagataaatttccagtatgaccctttaaatgtctcttaactctttcctactcatgctctgtttcattatacagatgaggagtaatgcaaaaatcagaagtattccaatcacattgtatctgcattctatattctagactaactacttgatctcctagccgcattacagtttatcggagatcattgatttgattagctagttttcagtctgtgttagtttgggaattccactgcaaagtagaatttttctgccaattatttacgtagtctgctctttgtactgtggaatgcaaagtaactccagctaccgtggcagtagctgtgacagcaatcaatcccataatgattaaaattaaagtggcaatgaaacaccgagagtacctcaaactcttttgaagaatttcagtaatgtatgcacagaaggagaggcttcccaaggacaggaaagctttacaggtatccatactccttctcaggctcttaccactaaaatagaatgatgagtattatacagggaagaattcaagaaaacaatgtacattcttgacaagtcacatgatgattagggagatcaagttttaaatcacttactccaaacagaaaaggaggccttattgtcagtctcgacatggctgcaactggggggtcctcgggttcctcccaaaatctcttcctcagcatctggctcatgataaggtttcaggtgtcttaatggtatccaaatcggctgctggttttggcctggagatacacaagcataacttctaccccaagttattattttacctatttcccaactttttgttatgggatctctccaccaaaccagttctgcttctgtctttgccgctgatttctgtaaatgctgttcagctgctgatagcatttggcctttaggcaggctcaaaaaatttaaagtcaataatgctagattcagttgcataattgcagttccataatcactgttcccccctttgtgtttttgtaattgctgttttagggagagattcattctttccacaatggcttgtccttgtgaattatatgggatgccagtaatgtgtttaatactctatatagagaaaaatgtagctagagcttggctagtacggccttgggtgttatctgttttaataaaagctggaatgcccatcactgcgaagcattgcagaaaatgccatttaacacaggcagaagagtccctcgtttgacaggtagcctaaacaaagtgagaaaaggtatctacacatacatgcacataagccagtttaccaaaagaaggaacataaatgacatccatttgccaaacagaattaggttccaatcctcgaggattaactcctcctgtaaaagatgaggaatgcaccaattggcaagttgcgcattgctggataatagatttagcttctttccaggtaatgctgtatctatgttttagaccagaggcattaacatgggttaaattgtgaaagtgtctggcattagatattgcagtagcaactaggcgatcagccatttgattccctgcagttaaaggtcctggaaagggtgtatgagctctaatatgagtaatgaaaaagggtgcattctattcctaactgtggtttgtaactgggtaaataaagtcattagctgttcatctgttgaaatcataactgagcatttttaattgtgtggaatggactacatatgaagaattagaaattacattgacaggcatcttaaaagcagtcagtaccttaattacagctacaagctccgatttttgagctgaagtatagggcgtgtggaagactttagtttttgatccagagtaagaagctttactgttactagacccatctgtaaaaacattttcagcacttttaattggtttaaatttagtcattctagggagcatctagttagttttaaaaattgaaataattttgtttttggaaagtgattattaagcactcccacgaaatcagctaagtggttttgctaagtaagatgatttataaaggattgttgtatttgtgcctttgtaagagggacaataattttttcagggtcatatccatgcagtttaacaattcaaattctcccattccctatcagagtagcaatttgatccaaataatgaattagaatccatgaattcatatgtggaagaaaaagccattctaccaagtctgcttttggacagtaacaccagtaggtgaatgctaagttggaaaaatcaataaatctaaagccttttctggatctattctatttatttgaggttttatgtacttgtttttcaatgagttgtaactctgcctcagcctcctttgttaattgctgagggctagtgagactaggatctcctttaaggatagaaaatagattactcatgtcataggtaggaatgcctagagcaggttgtatccaattaatgtcccttagtaatttttgaaagtcattcagtgttttcaattgatccttatggttactttctgtggcactactgtagtgtcatttactaaggtccctaagtaggagtaaggagtagtggtctgaatttttgtcaggagctataattaaactggcatgagaaatcgaattttttaagtgatcataatattggagtaatatttcctgagtgggggcagcacaaagaatatcgtccatataatgaataatataacactgaaaattttttatgagtaggttcaattgcttgttctacataagtctgacaaattgttggacagtttaacatgccttgtggcaacactttccaatgaaaacgcttagcaggctgcaggttgtttaccgcaggaattataaatgcaaaccgttcacagccttgctcagctaaggggatagtaaagaaacagtcttttaaatctatgactattaaaggccaattttttagaatcagcaggaaaaggcagtcctggctgcaatgtccccataggttgtataactgaattaatggctctaagatctgtcaacatgctccatttatgtgatttttttcttaataacaaagactggagaattccagggggaaaatgttggagctgtgtgtcctttttctaattgttcagtaactaagtcctctaaagcctccagtttctctttacttagcggccattgttttatccaagttggtttatttgttaaccattttaaaggtataggttctggaggcttaacaatggctgccatgaaaaattatatcctaaaccctggtgggaattttgtccttctgcttgaagtggtttctttaacccttttaaatttttttctaatcccatgccaggcacataccccatctcttgcatcgtatgctgactttgagggctatataattgttctggaatgaacgcttgtgctccccattgctgtaataaatctcttccccataaatttataggtacagcagttacaattggttggctgggtgtggtggctcaagcctgtaatcccagcactttgggaggccaaggtgggttgatcacgaggtcaggagtttgagaccatcctggccaacatggtgaaaccccgtctctactaaaaatacaaaaaaattagccgggcatggtggtgggcacctgtggtcccagctacttgggaggctgaggcaggagaatggcgtgaacctgggaggcagagcttgcagtgagctgagatcacgccactgcactccagcctaggggatggagccagactctgtctcaaaaaaacaaaaaacaaaaaacagaagttacaattggttgaatagtcccagattgttcattgggtccttcacaatgcaatatataactgctttgatatactttaggggctatgccaactccaactgtgttaaatcgagtgggttgaattggccacacggacagccagtgctgtagagaaatgattgaaatgtcctctcctgtatctaccaatcctttaaatttttttccttaatagttatttcacaggtaggatgtttattagtaatttgattcacccagtaagctgctttgccttgtttattcgagcttccaaatcctcctgttcatttagttcatagcacaggagcttccaaatcctcttgttcgtagcacaggagctgtgctatgggctctcctggctctgctttccagggaacagaagtagatataacaatttaaatttccccattgtaatctgaatcaatgactcctgcatgtacttgcactccttttaaatttaaactagacctacctagaagtaatcctactgtccccactggcaaggggtgccacagactcctgttggcactttttgcgggggttcctcaggcagaaagctcacaggttttgtgcagcataaatctactaccagctatggcaggggacaggtattgtatgggggtgagggagtggcctgagctggaaatgccccggtttggaatgaggcctgggacgggcccctcatggcgtttcctgaaatcgggttcccatcttcatcaaacttagagtgacactgattagcccagtgttttcgttttttacattttggacatatttcagggtcagcagatttcttttttcccccaactggcagcctgacttgctggttttttctacattctttttcaatatgatcatgcttcccccagttaaaacaagctccaggaagtggagtatttcctttacccactttcagtcctgccattgcctgggctagcagagtagtcttatgcagattacctccaataccatcacaagctttaatatagtcaaccaaatgtgcttttcccctaataggtcacagagtggcttggcactcaggattggcattgtcaaaaactaataaccacaacactacgtcctgagcagctgaatctgcaatcacctttttaagagactcctgtaatctagctataaaatctgcatacagttctttcagtccctgcttgacagcacttgaagggtattgttccctgcctgaagtgatttttttcccaagctctaatgcacactcctctaagctgctctatggcatcatcccacataaccacttgtgcatctaaaccaccccagccaccgactcccaaaagttggtctgcagttatattaatttgaggttgggcctgggcgttgtgagcagcctggatggaagcttcatctgcccaccaagttttaaattgtaagaactgagcaggagttagacaagctcaagtaagtgcattgtagtcagtaggaatcatttgactggagacagcaacattctttaacagtcccattacaaaaggagaacctggtccatattgattaatagcttgtttaaattctttaagtattttaaaaggaaaaggctcaaatgtagccatcatattcccctgttgatcaggtgggtgtattctaacagggaactgccaagcatccatatcacactctcatctagcttgctggattcctgcctgaatagaaccgagagcagttgcttgaggcgctgctcgaacagtcactagggcaactactttttgtccagtgtcctctggaaaagaaagacctggagggtgaggccactctttttcttcaaaatgatgagggggtgtagacgggtagggacaaacctctccctcctttgctgctttagctggcaaggaaaccttctctgtcacttcttctgtacttcattacactccccttcttcctctgattcctcttccttatcatctgtgtggaaaggctccaaggtggaatgaaccagagcccacactgaccagacagttataggaatatcctcagcgccatccttatatgacttcttcagtgtgctgcctaccttttcccagacctctacattcatagtttctcagtccggataccaggggcaatatttctctaccacactaaaaacctgcatgagtcagctagtgctaacctttacttttccttttctgaggagctgctgaaggagactcaaataagcctcgtgtctgctcgacccttgtcccattgttaccctgatgcttctgagctccccttcttactcaccgcagggattgcttaagagtacttgggtgttctccagtgtagttccacgttctccagccgtcactctggtgacccttcgacaagggtttgagccccatgttaggcgccacttgctcagaccagctcggtcgtggggaccctaacctagtggcgctagaggaattaaatacacagacacaagaatagactgtaaagtgtgatcagggggccaacagccttcagagctgagagctgtgaacagagtttgacccacattttattgacagcaagccagtgataagcattgtttctatagattatagattaactaaaagcattccttacaggaaacaaaacattcttagcaaggattagagaaacaggctctggctgattatctgcagcaaaaacgtgttgttaaggcacaggctactcatcctattgtttgtggtttgagcagttttctactttgggcaggccaggtgttccttgcccttctccagtaaaccaacaacttttagcagtgtgcgtcatagccatcatgagcacatttcattgctgcagaaatcctatttatggccagcttctttaaagcctgtttatgacaggcttagggcctgttgccagcaccgcagtccttctaacctcacttagattccatctcccgttacccagtgacatgaactggggatgaggcttcactgggcatggttctgggaagggctcactccctagcatggatggagatggggtgcgggccccatggtgttagagctgttgggcagtagggattgttcaggggccacatctgacttcaccgtcacctctctgtagaccagaagctgcacgtggaagtcatgtattatgcacaagcacctagtaaattctaggaaaggagtgaaggaaggaaaacgttttctgcttgatttttttcttctttttttttttttttttgagaccgagtcttgctctgtcatccaggccagagtacagtagcgcaatctcggctcactacaacttctgtctccctggttcaagcaattcttgtgcctcagtgtcccgagtagctgggatgtcaggtgcccaccaccacgcccagctaatttttgtatttttattagagatggggtttcaacatgttgtctaggctggtcctgaactcctgagctcaggtgatccacccacctcagcttcccaaagtgctgggattataggcgtgagccactgtgcccagccttcctgcctgatttttactacagttgaagctaaacgcctttcccagttttttatgtctaccttggttcagggaggacgttctctcatcattctcagcatgtgcctctcacagagaccgattttcctttggggagtctcctgcaccagctgtgttaagcaaaaaatgtgataattttgctcagagattggagcagatttttttttttgtcagagaggaggaaatcatattcttgtccacgaattattattatcattttttcaacatcaaattatgtataaatttgtcttataggaaaactccaaatgtacaggttaggccatcaaatacaaaacattccctgtcctaaatgtctatgtgacatgtaaataattgttatgggagggagccttccaccctctctcagtctcactgggacccactcctgtcacctctgtcaggagtgagagcaagtcctgtagaattatatgtatacagcattgtggtgttttaagtaaaattctcagtgattgttttatgatactttattctgtaagttgtgaaaatttactcctttacaacttcatgtgaacgttctctgaattaacaatcagtcacctctctgtttttagtgtctggcttggttcagggaagatgcgctctggtcagcccagctggagactctggaggtccctcgccttgtctgggatgtgtcctctctgggctttgcttgttacctcctcactgaagggggtgaccaggttctgctgaggagtgtccctttctgcacctgctcttcagcctgtgtggggcaataggaagctggggtctgcactgtcacctggtgtctgcctgcattactgctggctctggtttatactggtgcctttgttctcagtggcttcctgacctggggccctgttacttcaatgcttatgttcagacaagacagaaacttgtcccttaggcagttccctgaaaagtcagaaggttggatagacattcccattgttttcctctctcaggagatatctggagtttgtggtatcctctggatgatggcatgtcatgcctgggcaggggttctggtgggcgtgtgtcacattttcacactcagctcccagtaggttgacttggtactggtgcatctctgggtgcagcctcctgagtggcttctggatttctcacaaaagtcagttggcccacgtattcttgtttaatttgtgtccacatggattcaaaatggtccggggcttcctattcctctgtcttgctgacattactcttttagtagagttgcagatttctaacacaggtctggaatgtcttctagttaggggccatttcctaagggagatgtcagatgtttctttcctgtatgtgtcattttataaataatgctgctaaagaaggaaatttttttcaatatatttttttcttttttttaaatttattttcttcttttaattcatttttctttctttctttttgagacagagtcttgctctgtcacccaggctggggtgccgtggcaggatctcagctcactgcaacttctgtcttctgggttcaagcaattctcatgcctcagcctcacaagtagctgagattacaggcacccaccaccatgcccagctaattttttgtatttttagtagagatggggtttcaccatgttggccaggctggtctcgaactcctgacctcaagtgatccgcctgcgttggcctcccaaaatgctgggattacaggcatgatcccagcactgcaccaggctaatatattcttattagttaatatgttaaaatgacattctttgtcttggttaaaataattttgttaattatatacatttttaaatccagctttttcctgcctccaaccccaactaatttttttttttttaacctctctttctggcccctgcccaggcatcctgtgcagtggtgattggctgcagcacagaccagcccccttttccctgccttaaagtcaaggaaatgtctgccatgtttactgctgattatcatgtttcatgagacgttcttgcttaatgatatggttgtttttgttttcaaattttatttttgtccttgtttttaattatctagtaatttcttaagatgtatactgctagccggtcatggtggctcatgcctgtaatcccagcactttgggaggccgaggcgggtggatcacgaggtcaggagatcgagaccatcctggctaacacagtgaaaccctgtctctactaaaaatacaaaaaaaaaaattagccgggcatggtggcgggcacctgtagtcccagctacttgggaggctgaggcaggagaatggcgtgaacccgggaggcagagcttacagtgagccaagatcacgccactggactccagcctgggtgacagagcgagattccgcctcaaaaaaaaaaaaaaaaaaaaaagatgtatactgctgagatattttctgtgacttattttgttgaattattatatcatattaataaattttctgtcatgtattaatgttttattaatggaatatattgataaaccccattgggcttttgtaaataccaaatagataaattttatggacataattattatatttatgtaagtcagggttgatcacatgtgtgtagaatcccagcttcttgggaagctgaggcaggagcatcccttgaatgcaggagtttgagaccaccctaggcaacatactgaaaccccatctcaattttttaaaatattatatataatcatattttttatatcaataaagatgggatctttctatgttgcccaggctgttctcaaacccctgtcctcaagcagacctcccaccttggcctcccaaagtgctgggattacaggtggagccaccatgcccagcctacatttatatttttgaatctgggtatttaatagagattggagttcaactttctgtgttttttcatggtctatcattttttaatggcttaatatacagcaatgtttataaactcaattgagtacaatttatacatttttgttgtaaacatgctgaaatgtacatagcaaaaataacaatgacaggtgggtgcagtggtacaaacctttagttccagatacttgggaggctgaggagggagaaacatttgagccccaggagttcaaggccatagtacactgtgaataagccacctccatgcaacctggacaacatagtgagaccctgtctctaaaaattaaaaaaaaaagtgatgacaaatgtcatctaaaaaataggttattgacagacaactcctatttcagttgatgtgtataagtgtatatgtgtgctagtgtatatgggtctaagtgtacatatatataagtgtggaccgtgatgcgtgttcatgactgcacagatgagcaagcctatggttttattaaagacatgtcatcatttttatgtatttttttaacagttgaaattacatctgaaatattttccatgacctcggaaattgtcgtacaccatcatgttaatgagttgatggctgtgaatagtaacatgggatacatgtgtgtactcatatataattttttttttttttttgacagagtctctgtttgtcaccaggctggagtgcagtggcgcgatattggctcactgcaatctcggctcactgcaatctctgcctcccaggttcaagtgattctcctgcctcagcctcctgagtagctgggattaaaggcacgtgccaccatgcccagctactttttgtattttttagtagagactgggcttcaccacgttggtcaggctggtcttgatcccctgaccttgtgatccacccgccttgacctcccaaagtgctgggattacaggcatgagccaccatgcccagccataatgaccttttatgaaggtccatgattttatccctaaacttgttttaacttttttcttaggtaattgtcaatttacttttgatgctgatctgttcattgtttgattcttttggtttggttctaatgcccggacgcctgggatctggtgcttactttgctgtttttagtccttacacctggggcgagtttcttagggtatctgtgacacagttgtcttctcagtaagacagggacaggtctttctttcatgggcttttgttgttataggagttagtacatgtaaagcatttagaatagtgcctgtcacatggaaagtgttcaaaagcttcagtcattgctattgttatcatcccagttttataattctttttttttttgagacagagtctcactctgtagcccaggctgtagtgcagtggtgtgatgttggctcatcgcagcttctgcctcctgggtttaagcaattctcttgcctcagcctcctgagtaactgggattacaggcacccaccagtacccccagctgatttttgtatttttagtagaggtggggtttcaccatgttggccaggatggtcttgaactcctgacctcaagtgatctgccctcctcggcctcccaaaatggtgggattacaggcgtgagccaccgcgcccagcctataattctttctctttttttttttttttttgtgagatgaagtctcactcttttcccccaggatggactacagtggtgcaatctcagctcactgcaacctctgccttcctggttcaagtgattcttctgcctcagcctcctgagtagctgggattaacaggtgcataccaccacgcccagctaatttttgtattttaattagagacggggtttcaccatgttggccagactggtctctaactcctgacctcaggtcatctgcccacctcagcctcccaaagtcctgggattacaggcgtgagccaccatgcctggcctataattcttttttttttttgaagccactgtggacattgtcatctccaaagacaccacttgtcttgtagtggtggtgatattggtaggtattcagatcaggtagatactgaatatgacttggagtgtcaaaaataatagctaatgcttctatagagataaccatgggttaattttttatttgcatttcttatatgtccacaaaatgagaaatctattttgatttttaaaatataacttcttttggaaaagtataataaaacacaattcacaggccagggtggtggctcacacctgtaatcccagcacttagggaggctgagatgtgtggacaagagttcaagaccagcctggccaacgtggtgaaattccatctctactgaaaatacaaaaattagccaggtgtgatggtgtgcacctgtagtcccagctacttgggaggctgaggcacaagaattgattgaacccaggaggcggaggttgcagtgagccgagattgcaccactgcactccagcctgggcaacagagtaagactctgtctcaaaaaaaagaaaaaaaacacatttacagacacataactacatcacagataccttaatggggattcgtcagaacattctcttcaatccagttaatctttacaactcccttctcattttgagtgaagattaataccctttacatatcctgttggtgaaatgtggttttcattttagggacacttaacattcagggacgtggccatagaattctctcaggcggagtggaaatgcctggaccctgcacagagggctttatacaaggatgtgatgttggagaactacaggaacctggtctccctgggtgaggatcatgcccctgcagaagccgggatctgcccttggttatttcagcattttcccttgtgtgcctcctgggagcccctgcattgtttgactgacattaagcaggagaatcacttgaacctgggaggcagaggttttggtgagccgagatcacgtcattgccagcctgccaacagagtgaaactccgtcccaaaaaaaaaaaaaaaaaaaaaaaaaccaaaaaaacccttattgactcaggctgggatccgtggctcacacctgtaatcccagcactttgggaggccaaggcaggaggatcacttgaggtcaggagtttgagaccagcctggccaacatggtgaaaccccatctctactaaaaatacaaaaattagccgggcatggtggtgggagcctgtaatcccagctacttggaaggctgagtcaggagaatctcttgaacccgggaggtgaaggttgcagtgagccgagaatgcaccattgcactccagcctgggtaacaagagtgaaactccgtctcattaaaaaaacaaacaaacaaacaaaaaactaaaaaccttgttgactcagaaatgaaaagctccatagtgttttctggagttgaaatgtcctttttcttcagatgttctgtccccttcattatacatcattgggtggtaccagggcggaagtatgcataaaaccttttttgtttgtttttgagattgagtcttgctctgttgccctggctggagggcacgtgatcttggcttactgcagcctctgcctcccaggcttaagcaattcgccttagcctccctagtaactgggattacaggcacgtgccaccacacctggctaatttttctatatttcatttttacaatgttggccaggctggtctcaaagtcctgggctcaagcaatccacttgcctcagcctcccgaagtgctgggattacaggcatgagcccccgcacccagctgcataaaaccttatggcaaacttttcagatacccacttccctgttttctactcctgtgctttgttttatgttttgttttttttttttgagacagagtgtttcactcttggaggctggagtgcaatggcgcgatcttggctcactgcaacctccgcctcctggggtcaaatgattctcctgccttaactgctcgagtagctgggattagaggcatgtgccaccatgcttggctaattttttttttgtatttttagtagagaccgagtttctctgtgttggtcaggctgatctcgaactcccgacctcaggtgatccacccgtctcggcctcccaaagtgctgggattacaggtgtgagccaccacgcccagcctctactcctgtgctttatactcagtagttcttggaaaggggcttgatgtctgcatgttataatattccctaagcattcagaaggaggcagtctatggatgaatttgtgaaatattattcttgattcatttgtgatatcctgtctccttcctacacatagggcttggattttggagatgctacagcacattttgatttttttttttacaaacaggaatctctcttcctgacctgaatattaactccatgttggagcaaaggagggagccctggtctggtgagagtgaagtgaaaatagcaaaaaattcagatgggagggagtgcatcaaaggtgtgaacacaggtaagagctcagatgggcatggtggaagccatgctgttgtttgggctttttttttgttttgttttgtctagttttggttttttatgtttgtatttttgtttgttttgtttttgagatggagtttcactgtcatgaaacagagcctgagagacagagcgagactcagtttcaaataaataaataatttttttgtttatttgactggagatctttctttctctctctctctttctctttctttctttctttctttctttcttcctttcttcctttcctttatttgagatggaattttgctctattgcccgggctgaagtgcagtggcgctatctcagttcattgcaacctctgcctcccgggttcaagggattctgctacctcagccttccaggtatctatgattatggtcacctgcaccatgcctggctaatttttgtttgtattttcagttaagacagggtttcactatgttggccaggctggtctcgaactcctgaccttaagtgatctatctgcctctgcctcccaaagtgctagaattacaggcatgagctaccgcgcccagcttctttttgtttttcagatacaggggtcttgctatgttgattttgaacccctaggcttaagcaatcctcctgcctcagcctccataagtactctgattaccggcatgagccatgatgcctagtcttatttttttatttcgaatttagatttaattgatttaccaggaatatttaactaattcccccgacaatttcactgtctcccctcccgctttcttgtctgtttgtgtgaatttcagtattttggatactcaaatggaatcacacagtatttgtctttttatgactggcttatctcacttagcgtagtgtctttcaggttcatctattttgtagcacatcaagaaatttgtatattcttttaggactgaataatattcttctatttgtctgtaccacagtttgtttaactattcatccattggtggacacctgcattgcgcccacctttttattatttttgaataatgctgctatgaacatgggtttttgttgttgttgttttttgagacagtgtctcactgtctcgcccaggctgaagtgcagtggcgtgatcttggctcactgcaacctccaccctctgggttcaagcgattctcctgcctcagcctcccaaacagctaggactacaggtgcacaccaccatacccagctagtttttgtatttttagtagagacagggtttcaccatattggccaggctcgtcttgaactcctgacctcatgatctacctgcctcagcctcccaaagtgctgggattataggcgtgagctatcgtgcctggccttgaccatgggtttttaagtatctcttcaagatgctgtgtttactttcattttatttttcatttgtttgtttgagatggagtttcgcttttgttgcccaggctggagtgcaatggtgcaatctcggctaactgcaacctccacctcctgggttcaagcagttctcctgcctcagcctcctgagcagctgggattacaggtgtgtgccaccacgcccagctaatttttgtattattagtagagacagggtttcaccatgttgactaggctggtctcgaactcctcacctcaggtgatctgcctgcctaggcctcccaaagtagtaacattaagggtgtgagccagtgcgcctggcctttttcttttttatctttatacccagatgtggaattgttgcctatactgatcatttgattttggattctttgagaaaatgtcatacttgtttccatagtgactgcaccatttcaattttccaccaacagtggcacaaaattctcctatttctccatattttcgacaacacttgtgattttctggtgtttcatttttttcccttttcttgacaaaacgtattctatatgggtgtgaggtgatattctttattggtgtgaggaaaaatattcagttttctatttgcatttctctctaatgatttgtgatattttgcattttcttatatggtcgtatatcacctttggaaaaatgtgtatttctttccacatttcttaattcgttatttgttttgctttgtaggacttatttatatatttttattttattattttaaataattatttatttattttttgagacggagtcttgctctgtcacccaggctggatgcagtggcgtgatctcggctcactggtacctgcgcctcccaggttcaagcaattctcccacctcagcctcccaagtagttgggattacaggtgcacaccaccatgcctggctaaatttttgtatctttaatagagatggggtttcactatgttggccaggctggtcttgaactcctgacctcaggtgatctacctgctgcagcctctcaaagtgctgggattacaggcatgagccaccacatccggcctatatatattttagatattaagtttttatcacagatatgatatgcaaatattttctcacatatggtaggttttctttacattgtggtaattgttttcttctatccacaatagttctcaattttgtcatagtgcatcgtgtgtatatttaccttctttcctgtactatcaattttatatctggggaaatgttgaatccaatctcatgaagctttttacctatggttttttctaggagttttatcgttttaggtcatgaatagactttaagttaatttttgcatggggtgtaaagtaagggttcagcctcattcctttgcttgtgggcatcctttttcttcagcactatttgatgaagtgactgtcctttccttgttacatggtcttgacattttgattgaacattattctaccaagtatttgagggtttgtttctggcttctctattcttgctttttttttcatttttgcatggggggatggattctcgctctgtcatccaagctggagtgcagcagtgagatcttggctcactgcaacctctgcctcctgggttcaagtgattctcctgcctcagcctcccgagtagctgggattacaggcatgtgccaccatgcctggctaatttttgtatttttagtagagatggggtttcaccacgttagtcagtctggtctcaaactcctgacctcaagcaatctgcccgcctcggcctcccagaaccctgagattacaggtgtgagccaccacacctgggtcattttttactttaatggagaattttatcctctcatttgggttaccagtactgtctggaatccttttatttcattttgaagggctccctgtagcatttcttgttggacaggtctagagtagtaatgaactttcttagctcttctttatcgaggaaaatctaaatttctcctttatttttgcaggtgacttttgctaaatatagtattcttggttgattttaagcactttcaatatgtcatctcactgccttctggcaggcaaagtttccgctggagaaagtacatagtcttataccttttcctctaaatggcaaatatcttttttgttgctcctgtcaaaattcttcctctgtctttgatgtttgataatttgcttataatgtatctctgtgtgaatgtccttgggttcattttaatttgaatggtcaagcttcttgaattgtatattcaggtctttcttcagaattgggatttggacaattatttggacattatttcttcagttgcaatttctgatcctctgtcttctccttgtgaacctctaataatttgtatgttgttgtgcttgagagcatccgaaaaatgtattagcgtttatttgcttttcttctctgttttttgtttttggtctttgtagctgatactgtgttttttttttttttttttttttttaaattagagtcttgctctgtagcccaggctggagtgtaatggctccatcttggctcactgcaatctctgcctcccaggttcaagcgattctcctgccacagcctcctgagtagctgggattacaggtgcatgcccccatgtccatctaatttttgtatttttagtagagacaggctttcaccatgttggtcaggctggtctcaaactcctgacctagtgatcctcctgccttggcctcccaaagtgctgggattacaagcgtgagccactgtgcctggtggagctgatacttttgaataactgacctttaagtttgctcattctttttggtgctctatccatctgctgttgagcacctaatgaatttttactttatttattgtgtttcagctccagaatgttttttgtttcctcctttgtttaatatcctccttctcatgtattgtttttctgatttcatttagttgtctatctctccttgatatcttttagctcattaagaatcttaaggcagttgctttaaatatttgtcaagggccaggtgcagtgcctcatgcctgtaatcccaacactttgggaggccaaggcaggaggatcacttgagccaaggagttcgagaccagtctaggcaatatcacgagcccttgtctctaaaagaacacagaaaaaacttgctgaggctggatgtggtggctcacgcctgtaatcccagcactttcggaggctgaggtggccggatcatggtcaggagttccagaccagcctggccaacatggtaaaaccccatctccactaaaaatacaaaaattagctgagcatgttggccggcacctgtagtcccagttactcgggaggctgaggcaggataattgcttgaacctggaggtggaggttgcagtgagctgagattgcatcattgtactccagcctgggcaacaagagcaaaactccatcttaaaaacaaacaaaagaaataacaaaaaaccccaaaacttgctgaatgtggtggtgcatgcctgtagacccagctactcaggaggctgaagcaggagagatcgcttgagctggggaagtagatgctgcagtgagctacactataccactgcactccagcctggacgatagagtgagaccctgtcttaaataaataaataaataaatatttgtctagtaatttagagagctgcctgtctttttctaggtttggctttatttattttttagccatatttctctttcctttcataggccttgtaatttttggattaggtttggtaaaataactgcttctctcagttgttttgtataagacttggtcagagggagatcttttctaattagcctgttgtaaagggtgtgggaacactcactccttttctggggatgtgcctttcctagctttgtgcatgtactgttattatgtatactgcttctcttgagtgtcttattttccctagagacttgtcccttctttttctcagaaggtttcaattcctgttctatctctctactcataatccctctcaaactcacctgtaatcctcctgactcctacagatttcccagaactccagtgcatcaccttacccttttctattttcagcacaaccagcgtgatgtacaaagtgtgctgatatttcttccaatgtctgagtcagatgaggcagattctagtattttcatcagactctaaacatgccagaattatggggtctgaattttacttttttcttgctttcctagggagcagctatgcattgggaagcaatgcagaagacaaaccaattaaaaaacaacttggagtatcctttcacttacatctgtctgaactggagctatttccagatgaaagggtaataaatggatgtaatcaagttgaaaactttatcaaccacagttcctctgtttcctgtcttcaagaaatgtcttccagtgtcaaaacccccatttttaataggaatgattttgatgattcttcatttctcccacaagaacagaaagtacaccttagagaaaaaccttatgaatgtaatgagcatagcaaagtctttagagtatcttccagccttactaaacatcaagtaatccatactgtagagaaaccttacaaatgtaattcatgcggcaaggtctttagtcgcaattcacaccttgcagaacattgtagaattcatactggagagaaaccttacaaatgtaatgtctgtggcaaggtttttagttacaattcaaactttgcacgacatcaaagaattcataccagagagaagccgtatgaatgtaatgaatgtggtaaagtcttcagtaataattcttaccttgcacgacatcaaagaattcatgctgaagagaaaccttacaaatgtaatgaatgtggtaaaggcttcagtcataagtcatctctagcaaatcattggagaatttatactggagagaagccttacaaatgtgatgaatgtggcaaggccttctataggattgcgctccttgtacgacatcagaaaattcatactggagagaaaccttacaaatgtaatgaatgtggaaaggtctttattcaaaattcgcacctagcacaacattggagaattcatacaggagagaaaccttacaaatgtaatgaatgtggaaaagtatttaatcaactttcaaatcttgcacgacatcgaagaattcatactggagagaagccttacaaatgtaatgaatgtggtaaagcatttagtgagtattcaggcctttcagcccatcttgtaatccacactggagagaagccttacaaatgtagtgaatgtggcaaggcattcagacacaagttatcactaaccaatcatcagagaatccatactggagaaagaccttacaaatgtaatgaatgtggcaaggtcttcaatcgaattgcacaccttgcacgacatcggaaaattcatactggagagaaaccttacaaatgtaatgagtgtggcaaggcctttagtcgcatttcatacctagcacaacattggacaattcatatgggatagaaactacaaatgcaacaaatgcgtcaaagaatttagtgtgcactcaagccttactacccatcttttattccatactgcaaagaaattttgcaaatgtaaagaatatgacaaggtcttcaaacacaagtttttctaataactcattagagaatttatactggagagacttcacaattataataaatgtgtggaaaagtcttcaaaaaaatttcacaccttgcaaaaggagatctaaaaaacacaatcagaaatgacaaaggggacattaccaccaaccccacagaaatacgaaaaaccctcaaagattactataaacacctgtatgcacacaaactagaaaacctagaaaaaattaataaattccttgaaagatataaccccccaagattgaaccaagaagaaattgcatccctgaacagaccaataatgagttccaaaatttaatcactaattaaaaatctatcaaacaaaactctggaccagacagatttatagttgaagcctacgagatgtataaagaaaagctgttaccaatcttactgaaactgttcaaaaacatggatgcagagggactcctccctatctgattctatgaggccagcatcattctaataccaaaacctgacaggcacaatgaaaaaagaaaacttcaggctggtactcctgacgaatataggtgccaaaatcctcagcaaaatactagtaaaccaaatccatctgcacatcaaaaagctaatccaacattatcaagcaggctttagtgttgggctgcaaggttggttcagtatacacaaatcaataaatgtgatttatcacatacacagaactaaaaacaaaaaccacatgaccatgatcatctctttagatgcagaaaggtttttaataaaattcaacatcccttcattttaaaaaccctcaacaaattacacattgagggaacatacttcaataagaaccatctatgctggactcacagccaaattaatactgaacaagcaaaagctggaagcattccccttgagaactggaaaatgacagggatgaccactctcaccactccgattcaacatagtactggaagtcctaagcttagtgatcaggcaagataaagatatgaaaggcatatataaataggaagaggggaagtcagtttctcttgcagaagatataattctgtatttagaaaacctgttgtctctgcccaaaggctcctagatctgataaacaacttcaaaaaagtttcaggatacaaaatctgtgtacaaaaattagttgcatttctatacaccagtaatgtccaagctatgaaccaaatcaagaatggaatcccattcacagtagccacaaaaagtataaaatacctaggaatacagccaaccaggtaagtgaaagatttctacaatgagaattacaaagcagtgcacaaagaaatcagaaacaataaaaattgaaaaatatctcatgctcatggataggaagaatcagtattgttaaaatactgcccaaagcaatttacagagccaatgctatttctatcaaactaccaatggcatttttcacagaatcagaagaaaacattctgaaatttatttggaaccagaaaagcccaacctaaatagcaaaagcaatcctaagcaaaaagagcaatgtttgaggtatcacactacccaactttaaaccatactacaaggctacagcaactaaaacagcatggtactggtataaaaaaagacacatagatcaatggaataggtaagagaacccagaaataaaggcatatacctacaaccatgtgatcctcaacaaaactgacaagcaatgaagtaagaacttcattcaataagtggtgctggcataactggctagccatatgcaggatattgaaactggacccctatccttcacgatatacaaaaatcaactcaagatggattaaagacttaaatataaaacctaaaagtattaaattcctagaagaaaacccaggaaatgccattctggacataagtgctggaaaagacttaatgatgaacaccccaaagcaattgcaacaaaaacaaaaattgacaagtgggacctaattaaactaaataacttctgcacagcaaaagaagctatttgcagactacagaatgggagaaaatgtttacaaactgcatctgacaaagatctaatccagaatctataaagaactcaaacaaatcaacaatgagaaaaacaaccccattaaaaactgggcaaaggccatgaatagacctttctcaaaagaatacatacatgtggcaataagcatatgaaaaaaatggttaatatcgctaatcattaaggaaatgcaatcaaagccacaatgagataccatctcagacctgtctgaatgggtattatcagaatgggtattattaaaaaatcaaaacatagatgctagtgaggctgcagagaaaagcaaatacttatacactgctggtgggaatgtaaattaattcagccattgtggaaagcactgcagcgatttctcaaagacataaaagaacatagcattcaacccagcatcccattactgggtgtatacctaaaggaatataatcattccaccataaagacaaacacttgtatgttcattgcagcactattctcaatagcaaagatgtggaatcaacgtaaatgcccatcagcagtagaccagataaagaaaatttggtacatatacaccatggaatactatgcagccataaaaaagaacaagactgtgtcctttacagcaacatagatggagctgaggctcttatcctaagtgaattaatgcaggaacagaaaatgaaatatcccatgttctcacttataagtgggagctaaacattgattacacatggactcaaagaagggaacagtagacacgggcttatgggtggaggttgggaagaggatgaagattgaataactgcctgttgggtactatgctgattacctggggacaaaattaactgtacaccaaactcctgcaacatgcagttgacccatgtacacatactccttgaacctaaaataaaacatgaaaaaaagcaaatttcacaccttgtaaaacatcaaggaatttatattgcaaagaaaccttacaaatgtatgtagcaaagcatttagtgtgccttcaagtcttaatattcatcaggtaatctgtaatgcagagaaaccttacagttgtaatggatatggggctgggcatagtggctcactcctgtaatcccagcacattgggagaccaaggtaggtggatcacctgaggtcaggagctcaagaccagcctggccaccatggtgaaaacctgtctctactaaaaatacaaaaatcagttgggcatggtggcatgcacctgtaatcccagctactcaggaggctgaggcaggagaatcacttgaacctgggaggcagaggctgcagtgagtagagatgaagccactgcactccaatctgggcgacagagtgagactctgtctcaaaaaacaaacaaaaaagatgtggcaaggtctttactcagaattcaaaccttgcaaatcatcacagaatccatgctggagagcaaccttacaaatgcaacatgcgtggtaaggtctttaatcagaattcacaccttccacagcatcagataattcattcacgagagtccttatagagtatggaaaactcttcattatgagttcttatattaatcagcgccagagtgtcgtactagagagaaatcatataaatgtatgtgacacaggctttatccagccccaccaagtcactggacgtcaacacatacatctttgaggaaaccataggctgggcgcagtggctcacacttgtaatcccagcactttgggaggccaaggtgggcggatcacttgaggtcaggagttcaagaccaacctggccaacatggtgaaaccccatctctactaaaaacacaaaaattagctgggcatggtggaatgcacctgcaatcctagctactggggaggctgaggcaggataatcacttgaacccaggaggtggaagttgcagtgagctgagattgggccattgcactccagcctgggaaacagagtgggactctgtctcgggaaaaaacaaaacaaaaccataaagatggattgtggattgtggatgcaaagggtattaatcaaggaccataactattgaacatgagagcactgagcatttacagaagaaataactcagtctctagtacttccgtattaatatatgacatagcatgttgcagaaaaattacaagccaaaagataccaagcctcatgatgcaagggtatgtggaaattgcgatttttattcaggttattaaaatatttaattccttgggagttttggaaaggctactttactctttatgactttcagcctaaacttaaaactctcattatgtgcttttcctacaggcctttcactgtggtctctgggaaagaatcaacagcatgacagggctgattttattagctggggagcatttctatccagtttcctggaagaaggacattgccttttcaggttaaatattgtttgatttagacagcatggaggtgagcagagaataacaaaactatgtatcagtcatcctacttactgtgttcagcaaacctttttcctgacaggcacagtgctataaacctgtacagcaggttacactactgaatactgtaggcaattgtagtaaaatggaaagtatttctgtgtctaaacatagaaaagttaccataagaataccatatgaggccgagcgtggtggctaatgcctataatcccagcacttttggaggctgaggtgggcagatcacctgaggttgggagttcaagaccagcctgaccaacgtggagaaaccctgtctctgctaaaagtacaaaattagccaggcatggtggtgcctgcctgtaatcccagctactcgggaggctgaggcaggagaattgcttgaacctgggaggtggaggctgtggtgagccaagatcaccccacattaaataccatataaaagaaacaaagtgcacctatatagggcacttaccatgagtggagcttccagaactggaagttactctgggtgagacagtgaggagtagtgagtgaatgtagaggcctaggacacactccacactactgtaggctttagaaacactgtacacagctgggcacggtggctcacgcctgtaatcccaactctttgggaggccgagatggctggatcacaaggtcaggagtttgagaccagcctgaccaacatggtgaaaccttgtgaacactaagattacaaaaaaattagccgggtgtggcggcgcatgcctgttatctcagatattcaggaggctgaggtgagagaatcacttgaatccagaaggcggaggttgcagtgagccaagatcatgacattgcactccagcctgggtgaccgagcaagactccatctcaaaaaaaagaaaagaaaaaaaaaaacaaaacactgtacacttaggctatactaaatttattttttaaaaataaagtaattgtgctgtgatgttaccatggctgcagtgtcactaggcattagggatttttcagctccattgtaatcttatggtaccaccattgtatatgtggtcagtagttgaccaaaacatcattatgtgatgcatgactacttattttcactgatgtcctttgccattttaaagtgatggaggtctttgtaccataatatgttaggctaagtaatgggtttctgaaacatgttaagagacaaaatactgtaagactgaagttaaattattactgattacatatcatataatggattaataatgaaggaatatttaatttaggaataatgtaattattgaaattgactgggctgggggcagtggctcacacctgtaatcccagtactttgggaggccgaggcaggcagattatgaggtcaggagttcaagaccagcctgaccaacatggtgaaaccccatctctactaaaaatacaaaaaaattagctaggtgtgttggtgggtgcctgtaatcccagctactcaggaggctgaggcaagagaatcacttgaacccaggagacagaggttgcagtgagtcaagatcacgccactgcactccagcctcagtgacagagtgagactccatctcaaaaaaaaaaaaaaaaatgaggaaaagacaaacactaaaagtggcatctagatttttttttttaagatggggtctttctctgtggtccaggctggagtacagtggcgtgaacacaatccattgttgcttcagcctcccagactcccaagtagcagggaccacagccgtgcaccaccatacctggctaatatttatttatttagtagagacagagtgttgctatgttgccaggctggtttagaactcctgggctcaagggagcctccgaccttggtctcccaaaatgctgggattgcaggcatgagccaccatccaccagattttttttttcttttctttttaacagagaactatcacaagatacatctgaacctgcaaactgccaattcccagatttttttcatctgaaactcatcataatgctaacttttctacaaacagatattgcctaaggccaagagggataatagtttcactataatcagcagacctcagatattttctgtggatagtactgtatccatgaagcatatgatatgcccacctttcagaaaaaaaataagttatttatattgcagccattgcctctcagacattcagttttttgatataattgtcacatagttatatttattcatcatgacatgaaaagaggctctatactgacacctctattatcctgaaaatcatgtttgtaatttttgtaggctggataaacttcacaactacaattgcagtgtgatttaaatatcagataatagtatagaataaaacatcaaccatcaccacaagtgtggattacattaaattactgtcagaggtattagggatttgtatagacgggaggaccaagtgctccagattatttcagcaactcattgggatgtagctctggactagtttaaaatttttttttttttttttttgagatggagtctcactctgtcacccaggctggagtgcagtggcgtgatctcaactcactgcaacctccacctcctgggttcaagtgattctcctgcctcagcctcccaagtagctgggactacaggcacacgccaccacacccagctaatttttgtatttttaatagagatggggtttcacaatgtttgccaggatggtctcgatcttgaccttgtgatccacctgcctcggcctcccaaagtgctaggattacaggtgtgagccgtcacacccagctggacccgtttttatgaagaattttctgacataagcacttctccagattcctgaaggcctccttaccttcacagatgcgcctctcagaacaaaatagaaaatactcaccagactcttttctgctcccaggatggtgggctcagtgtgaaggttataacagccagtatatctgtgagagggagacagccaggccctgagataaaggtttgtgattctgcgacctcacctccccgaagaaccacagttattagtttacctttagcaaaattgcagtgcatgctaggaaagtcaaaaatattttttctaataatttgtttccattctcaattaccagaaacaattacagtgtctagtgagcatctccaaagagactaatgcagtatttagaagaggcttttttatttccatggaccctggaagcagacaggggctcaggtggagagtgcaggacacgctgaggtctgagccatgagggactctcagcaaattgtacacctcacgcgaccttctgcttccttgagttctgctcaaaatctaactttttcctgactctgagaaccatatgcttccagaccccttctagattatgggaaggcaaatgggataccatgaagagaccaagaaggatctattaatgcactaagagtgaaatgaagaatgtgatgtcaataattgatagtctgaaacattaaatggcactttctgatatacatgaatgattaaataaataattgggagataagagacccaactcctatgcagaaaaattccaaataactcttgtagacactccacctccaaggaggtggaatacacataactcccaactccacaaatgcaggctgcacagtgctgcttccttttaaacaatacaatatggcagggagagaatgtgaggatttttatagctgagaaacctgacagacacagcctcagacaggtgatcaaggttgacatccaaaggggattaagtaatgttaatagtatacacctttgataggatgtgataaaaatggcacttctcattggtttttctccccagtatacttaacctttgtctaatcatggaaaacatcagacaaatcccaatagagtggcagtccccaataacacattgacagccctgctacctaaccagtactcctcaaagctgaccaggttataaaaaacaagagtctgagaatctgttagagccaaggggagcctaaagacacataatggttaaatctaatgtggtggcctggacaggatcctggcagagaaaaggtcagggagccgaaggcctgtgggacgtgaccaactcagcattcctctggaggctatatgatcaaacagcaaactgtttatcaagaatgcaggatatgggcaaactcacacttccctgccaccaaaaggtttgctgagggacatgtctcccttgcaccgggctccttgaagttatctaatgagaaatctagcacctattattcaaaggatgcagtcttgcaagcctgctgtgaaccaaacggctgactgacaattacctgacaatcaccctgcctttctcgctctctcttttgcctaataaatatggagggctgtgtaaagctcagagcccttgtccactagaggcaaatatactctcttgtcttttatttccacatttgccccctttgttcaatccccctaggtccatgtgggttacaagtggcgcctgaacagggacagaattgggtgctttataagtggcatcacgaagtggcaccctgaacagcgacagtggcatccaaactcgggactatgaggacataaacgaagaaggtctgctggagcagaggaactgaaattgacaaggtgaacaaggaccccgggacgagtctgccggcagcggatataaggtcagtgccctaaagaggtactgggagcagtgctttaaagaagtactgggaatgggaagttttctgaatcagggtaacaaggggaataatttgtctattgaagaaacattatttgcagttgtaaagttctgttgagacagtctggagctcaggttaatttgcagacactaactaacctcctgcagaagccccaaaaagctattatgcgtaacccatggtttccataggcaagcactcttgatgtggaaaactgggatagagcaggagatggattgaaacaggctcatcaaaaaggttttaaagttgattcttcagttttttccacttggagttcagtttgtactgtatttctgccattatcatcttcttattctgtgggacagcaagctgaatctaaaaatctgaaagaatatgttgctctacccacagctccaactgaaaataaaaaacaggagaaggaggataaaaattgggctatacagcctcctccaattgcagaaacatttgtaccaccaccttcggtggcagaaataagagaccctaatacaaagaattttatgctctgctgtcatagctggagagcccttaggaccttgcacttttcctatttccgtaagacctgatccatataatccacagcagtttattcatgaacacaccccactagaatttaagttgttgaaggaattaaaaactagtgtggtcaataacggagtacaaagcccatggttcctggaggaaggaatgctagacgtagaactctgagaacaagtgaggagaaatcttaacatcaggcgcaaaggcatcaggtccaataaaatctttaatgttacgggctttaattagatcagcctttgctcagttacacacagaagagcctaaaaagaggaaggaggagaaaacatcacttgccttatcacctcctcttccctcagccccagtatcatcaggccaaaataacaaagaggaaatggaagtcttacctaagcctcctcttccaatagataggacaaaggacagaggatacactacagctatcagtccctgtgttaagcaggcaacattagaaggagagctcttaacctgctcagtaatgcaaaatcggcaaggcaatcaggtgtatgtttataaaaagataagaaaaaacgcattagaagccgaaactgcgcagccaagcaggcagtaggtggaagaaaaggctcagcagcagaaaagctcccggtaaccaagccgacaaggcctgcccaggctggcaacatccccctggcaaaggagggagggaccggcgcagacacaggcaaagcctaagaaagtacaacatggctgcctcccaggacctgcaccgctgccctctggctctgtgggcagcccgtagcaaaatttcatgtgttacgtcccaggctatgattctctgctaagatttaagtaaaatgtaagaatttgaaaaacctgctttctaataatggtcactgttgttacctctcttctatccctgacgtagctttccaaattcaatttaagtaaaatagtaacctctgaagggagagagattacagagggcccatgaattagttaaagagtaattaaaagctaggcatgtaaaaccacacattactctttaaaggagaactttaaacctaattaaatggtatttgttaaattaaaaggtaaaaatgctgtgcccttctcagaaagtgaagaaaagttgtatgtaagtgtagtgaaaaacttatgcatgaatgactgtcttaacctactgattacagatagtctttgatttgtgcttgctaaaagagtcctaaattgagttctccagctatggagtcactgttttcaagactgtttgccagattaaactccataaacttggtcacatcccacaggccttcagctccctgcagaaaagaacatgagttaaaaccaaagaaatcagaataaattatgaataagttgatggtagtatatcaacaatggtttataaactgtaaaacccatacaaaactagtataagatgttaataatagggaaaacgggtcagggtatatggaacttgtctaccttttttgaattttttaaatataaatctataaatcttctaaaataaagtgtattagttttttaaataactaatttaggccgggcttggtggctcacgcctgtaatcccagcactttgggaggccaaggcaggtggatcacgaggtcagaagttcaagaccagcctgaccaacttagtgaaatcccgtctctactaaaaatacaaaacttagccaggcatggtggcacgtgcctgtagtcccagctactcgggaggctgaggcaggagaattggttgaacccgggagttggaggttgcagtgagctgagattgcgccactgcactccagcatgggtattggagtgagactttgtctcaaaaataaaataaaataaagtaatttataaaattaaatgaatattgactggaaacacagatgaaacaaattttctaggaaaatgtactctaccaattttgacagtagtagagacagaaaatctaaacagaatgtaagatgaaacatataagatgatttaacagagaaattgcaccaatctttcaggcaggagaatcacctgaggtcaggagtttgagaccagcctgtccaacatggtgaaaccgtgtctgtactaaaaatacaaaaattagccaagcactgtggtgcaagcctgtagccccagctacttgggaggctgaggctggagagtcgcttgaaccggggaggcagaggctacagtgagctgaaaccgtgtcactgcactccagcctgggtgacagagcaagactctgtctcaaaaacaaacacacacacacacacacacacaatgtaatttacatctattttttaaagttattggtttttttaaaagcaacagttgggccgggtgcagtggctcacccctgtaatcccagcactttgggggccggggcgtggggggggggtgtggatcacgaggtcaggagatcgagaccatcctggctaacacggtgaaaccccatctctactaaaaatacaaaaaattaggcgggcgtggtggtgggtgcctgtggtcccagctactcaggaggctgaggcaggagaatggcgtgaacccaggaggcggagcttgcagtgagcctgggtgacagagcgagactccgtctcaagaaaaaaaagcagttggtggtggcctaacatccctccggggacaggacccatcgccgaacgatgggtatggtggcatgtgcctgtagcgtttttaacacacagggaagcgaccgccagactctcacggagatgccccgttcgttctgccttgggccaggtaaatacggattcccaggttggccttaaccctccaacgcgcttggcgttgtccctcggaaactctctagagatgagcactctagagatgactcagtggactgggaaaggcagacccacctcaatttgggtgggcacaatctaatcagctgccagcacagtcagaataaaagcaggcagaagaacgtgaaaacactagacgggcttaacctcccagcctacatctttctcccgtgctggagatcagagatgatgatggaaagggagaagatttctattatgttctgtgggccgtcagcatgaaattgcacatgctacccaggcagggctttgcatttcacattttaacttgcatcgccttcacacagaattccaggccttttaaattaaattgttaaaattagtttttatttacttatttattttaggacagagtctacactgagtatagcactgggtctacactacgcccaggctggagtgcagtggccatgatagctcagtgtagactcgaactcctgggctgaagcgatcctccagcctcagcctctctagtcgctgggactacaggtgcctgccaccacggccggcttaaaattgattttaatagcaggaaatttcctggatctaatcctcaactgacgttgctttgctccggcaggatcccagtttgcagagggctgagctgctccagcctcactgccagcaaaacccggaaaacagaggcactggaggcgtggcctagggaagccccgccccgtcccgtcccggtccgctctctatgctgcgcgcgcgcagttttttgcagacccggaagcggatcgcgtgggtagaaggtcacaccgcagcgcgtcagtttccctttgtttagattcaatctgggcttcccagctcccccgcgcttctgtacccgggatctgagagtcaacacagaccttgaaatccccgcaccgctccctccaccccgtgtaaattcaggcgtctccgtgagagtccggcgctcgcttccctgtgtgttaaaatcgctcggcgacgggtcctgtccccgctcgttctgccttgggccaggtaaacacggattttcgagactcctttccgcttaaaactctttactgacccaacgtcctgccccgcgcttttaaaagtccttaccgcaaggtggattcccgcccggggagcctcccaacctcgcccccggcccctgaagcgcagcgccgcagccccagtcccggcgggggaggccgcgtcctgtactgggtcctgggacccttgagaccccacacttctaataattcagccccacccttttcctccttgatccgggccttcctactccccaggcctccccttcgcagccatcgctactcccgacccccgggtgtggggacgtgacttcttctgtcttaggacattcaggattcttcgtcccaaattccatcccactaaaaatgtgctcttggcggaggtgggcaccttattgtactcccctgcctatggatgtgtggggaaagatggtgaaagagtggcaggaaatagaaaaattttgaaaaagaagcatgagggagatccataagcagacggcagagagtagctgagagatttacagagacagtgaatgaagccgagaatgtagcagggggagaaaagtaactggagaaatgtagagaaaagctgggtctccagagagatgaagatgaagcaagattgggagaggggcagaaagggggaggctcctcagacagagtaggggagaggaggagggatttggagccagggcagacagagcagcatggtgctgggacagcaagagggggcagctgatgacaaggagagcagagggagaaccacagcatggggaggcctgggatccgggggggccagagagtggggacaagagagtgtagcagggaagaggaaatttaacagggagaacagagaggaagcagagatagggagggcaagaaacaggcagaatggaaattggggacaatcaaaaattggacacaaagaggaacaaggggtaaaacaaattgccagaatggagcagaacaaatggaagagaaggaatagagggaagagggggagaaacagcaggagaggagaggggcagaaaaataagccaattcttatgggaaaaatgaagtgaaaaaaagcaggagaaagaaggtaagaatgagagagctgtacagaatgagggagggaaacatactaatgacaaaagagggggaacctgagtgcagatgagcgatgagttgatggactattatgatcaaattgtgatatactgatttctctaattgtaatctaataagcacaaaatttatttcaaaagtacagatgaagatgagacttgcaaagttcctgcctataagggaagtgcattttataattcttgacatcacaagttagcttccattcacaatccctgttcagccagagggcagtgacttgcctcattcgggtgtgggtgagtgggtaagacaggaggaaaaaccaaagcgtttttcctacgcttacaatcaacacaatagtgaacacccaacacagaatgccacatctctggtcaccaaaatgtgttggggattacttcccacccacaagcagttcatcagacaccacctgggtgttgtgtaatttaactcaatttcacactaacactatctatgtggagttagcctcagattctacaggttgagagctcagttccacaggcatgctcccacttcaggtgccacttgcaagtcctgggttgggacttgaaccttgtgaccaaccaactatgaaccgggggttcccatgaccctttcctcacattttgtgaatttgctagagtggttcacagaactcagggaaactttttgcttagtttcacccatttgttacaaaccatattacaaaggatacagatgaacagccagatggaagagccttcctagcaaactaatcaaaatgaggggcttttggaccaggcgcagtggctcttgcttctaatcccagcactttgggaagccaaggtgggcagatccacttaaggtcaggagttcaagaccagcgtggccaacaaggtgaaaccccatctctactgaaaatacaaaaattagctgcgcatggtggcgtgtgcctgtaatcccagctgcttggctgagacacaagaatctcttgatcccaagaggtggaggttgcagtgggccaagatcgcaccactgcagcctgggcaacagtgagactctgtctcaaaaaaaaaggaggggctcttagtaaacatgtttttttttctttgagacggagtttcggtcttgttgccctggctggtgtgcactggcgcgatattggctcaccactgaaggggtggcctgcccctccacacctgtgggtgtttctcgtcaggtggaatgaaacactcagaaaaagaaagagacacagagcaaagtacagagaaagaaaagtgggcccaggggaccggcgctcagcatacggaggacccgcgccggcccggtctctgagttccctcagtatttattgatcactatctctaccatctcggagagggggatgtggcaggacaaaggtaatagtggggagagggtcagcaggaaaacatacgaaccaagatctctgtcataaataaggaaacgtgctgtgccttgatgtgcatgtatacaaacatcttggtgcagtaaagagcagtattgctgccagcatgtctcacctccagccctaaggcggttttctcctatctcagtaaatagaacatacaatcaggttttacacctagacattctattgcccaaggacaagcaggagacagatgccttcctcttatcttaactgcaaagaggccttcctctttcactaatcctcagcacagaccctttatgggttccaggctgggggatggtcaggtctttcccttcccatgaggccatatctcaggctatcacatggggagaaaccttggacaatacctggttttcctaggcagagttccctgcggccttccacagtgtattgtgtccctgggtactcgagactggagaatggcgatgacttttaccaagcatactgcctgcaagcgctttttaacaaagcacatcctgcacagccctaaatccattaaaccttgagtcaacacagcacgtgtttctgcgggcacagggttggggctagggttacagattcacagcatctcaaggcagaagaatttctcttagtacagaacaaaatggagtctcttatgtctacttctttctacatagacacagtaacagtctgatttctctttcttatccccacacaccacaaccattgcctcctgggttcaagtgattctcttgcctcagcctctccagtagctgggattacaggtgcccgtcaccatgcctggctactcttgtatttttaatagagatggggtttctccatgttggtcaggctggtcttgaactcccgacctcaggtgatccacccgccttggcctcccaaagtgctgggattacaggcgtgagccaccgatcctggctggaaaccatgctttttatctgcatctaaactgaggggcagccttgtgggactgcacctttaacccgtggaatctgtgcctatctccaagtagacagtagcaaagttgagttaacctgtgggacacacagctgcgagcgtgccacagaactggtcagcacgggccagacgcgttggcttaagcctgtaatcctaacactttgggaggctgactcaggcagatcacttgaggtcaggagttcgagactagcctggccaacgtggtgaaaaataaaaaattagctgggcgtagtggcttgtgcctgtaatcccagctactcaggaggctgaggcagggaattgcttgaaccctggaggcagaggttgtggtgagctaagaccgcgccactgcactccagcctgggcgacagtgaaactccgtctcaaacatgggggaaaacacacattttggtgatgggcggcatagtattctgtgctgaatttgagtgtagtaaaaacagttatcttttttccttacctcaaacagtaaagggaagagacttggcccaccagtctcagggcctgtgatgtctactcaatagtgatggaatgatctgtccctgctcctggctgctgctgatcctgagactgtacaccatgtgccagccccacttacagtctcagagtggaatgacatccctcctctatggtgtcgttaatttttttgtctaggaaattattattattattattattattatttgagacggagtctcactgtgtcacccaggctggaatgtaatggcgcaatctccactcactacaacccctgcctcccgggttcaagcgattctcctgcctcagcctctcaagtagctgggactacaggcacacgccaccacgcctggctaatttgtgtatttttagtagagacggggtttcaccatgttggccaggctggtctcggactcctgacctcaggtgatctgcccgccttggcctcccaaaatgctgggattacaggcgggagccactgctcctggcctagggaattattttggtcagcatactgaaatggaggtgttgtccactgaaacacacacactcacatactcactcactaaagccttttcgttccatttttcaatctttaaaacaaaaaatactgtatttactacatttctccctgcagtaagtacccctcttgcatgctctatttaagatcacagtacactaaaatcttgtttatattctctcttcaattcttgcccctagttcttggttgactccatccaatcaagttatcgcatccacccattccattgctcctgcgacctgtttctaaatttatttttatttttaaaaagttttattttttatttttattttttttgagacagagtctcgctttgtcatcaggctggagtgcagtggcacgatctcggctcactgcaacctctgcctcccggattcaagcgattcttctgcctcagcctcctgagtagctgggattacaagcacacgccaccatgcgtggctaatttttgtatttttagtagagacggggtttcaccatgttggccaagattgtctcgatctcttgaccttgtaatctgcccgcctcggcctcccaaagtgctgggtttataggcatgagccaccgtgcgtggcccctaaatttatttttaattaattatttatttttttaagggacggggcctcactctattgcacaggctggagtgcagtgaggcaatcatagctcactgtaacctcgaactcctaggctcaaatgatcctcctgcctcagtctcccaagtaggtaggactacaggcatgcaccactatgcctggctaatatttttatttatttacttatttatttatttttgagacagggtcttgctcccagtctcccaggctggagtgcagtggcataatcacagctcactgcaacctcgacgtcctgggctcaaacaattctcccacctcagcctcctgaatagctgggactacaggcccatgccagtatgccactaatattttggttttttatagagttggggtcttgctatgttgcctaggctggtctcaatttcctggcctcaagcgattctcccatctcagccacccgagtagccaggactacaggtttgtgccactgtgccatgctaatattttgatttttgtagagttggggtcttgctgtgttgtccagactggtcttaaactcctgagctgaagtgattttcccacgtcagcctcccaaaatgtatccagatggaggcatcattcattaaaacacattcctacataaaataaaggttttattttccttctactcttctatctttaaaacaaaaaatattatattaactacatttcttcctctaggaagtacccctcttctgtgctcccaaatctctggaattacaaggatgagcccctgcaccaggcttaatagtttttaaatttttgtcctcatctttctttccctgtcagcagcaatttgcacagccgatcactccctcttcttttttcttggctttgaagagattcttcataatttaaaaaatctgtttaactttttttttttttttttgagacggagtcttactctgtcacccgggctggagtgtagtggcgcaatctcggctcattggaacctctgcctcccgggttcaagtgattctcccacctcagcctcctgagtagtcccgagctgggactacaggtccgtaccaccacacctggctaatttttgtatttttagtagagatggggtttcactgtgttggtcaggctggtcttgaactcctgacctcgtgatccatccaccttggcctcccaaagtgctgagattacaggcgtgagccaccgcgcctggccctgtttaacatttttgtcatcaccttcatgtctcctgaactgtcttctgtgaatatgggagtgtcccacaatttagtccttaaacctgttctctctgcccacaccctctacctttccttatgatctcgtcttacagcttcaaacaccacctgcctgtctccattttccctctccacccacccctctctcctgaattccagaatcctgtgtccactcgtgttctggacatctctgctggggcatccacaggcatctccaccttcatatgtccaaaagagaccctgaactccccaaacacgtatccccagcagtcctgcacatatcagatgagggacaccctgtactttctgggaattaagtaaacctgtcaaatgtatttaaaatgtaggagatattttcttatttgtgttttcatttataatacaaacaataaatcacatgtttacttacatgcctgtaatcccagctacttgggctaaggcaggagaatcgcttgaacccagggggcagaggttgcagttagccaaagatcacgccctgcactccagcctgtgcaacagaatgagaccctgtctcacaaacccacacacaaaattatccggctttggtggcaggcgcctgtaatcccagctactccaggaggctgaggcaggagaattgcttggacctgaggcagaggttgcagcgagccgatatcatgctattgcacttcagcttgggtgacagagtgagactgtctcaaaaaaaaaaatgtatttgctcagttaggatggaaataggcctgtatggaaagtacagttaatgtttgagttgtaccttgatacaagcagtttcttgggagaaatggcatccagcccagtggagacccgcaagaacaggtcatgtccatacattcccgctagagggcagtgctggtgttggtcgaggcttcggaggtcaccttgaaggctaacggtgtgatcattggagaacagctggcatacagccacgtctcagtgtaggctgcaggtcttcagagaggcccctgacagcagagtgtgtcgcagcctctggtctcacagtgcctgtcaacctcttgaatttctgtgtattttgaattccagtagtcgaggtcagaatctcatatatggggtctgagaaggtgccatataacattctccaggggagctgggaatccaaccacattctctggggtgggagggaagtttactccatttcctatttatgggggctgctaaggggtgatgcatcactcgtgaaggaaggaggaacacactccaagttcttatcacagcacacaagtcattcatgtagcaaactatgtaagtggaatcatttgaaacctacataacagggggcccaggtttctcctgcctcagagacttcatctgggctgttcctctgcctggaactctctggcccctcagctgcaggtgacaaacacccttccttccccaggcctttgttctggtagtaccttcttaggattctgtgacccccccatagcccccgatttaacactccagcctgaccccaccccaactctcctccattttgaagctgtgtgtgtttctttctttcccttttcctgccactgtctggatcctggtgacagcaaggacccaaggggagagacgagccagaaggtggggactgtgctggctcaacccctctgagtggagctcagccctagtctcacatttgagagctgaggcattttgcagaaacatctcttgtgcctccttacagagattctgatttcaatactcaggtggaggccaggcctaatatttaaagctgatgctacagtagttgctccctatctgctggtttgatttctgtggttccagatcctcgagtttaaccgtggtctgaaaatattacacagaaagttccaaaaatgaagaatgtacaacttttaaatttcttgccattccgagtagtgtgctgaaatctagcactgtcccactctcttttgtttttgaggagtctccattgcccaggctggaacgcagtggtgcaatatcggctcactgcaacctctgcctcccaggttcaagtgattctcatgcctcagcctcccaagtagctgggattacaggcatataccaccacaccccactaattttttgtatttttagtagagacagtttcaccatgtagcccaggctggtcttgaactcctgagctcaggcaatccacctaccttggcctcccaaagtgctaggattacaggtgtgagccactgtacccggccagtcccatgctattttgcccaggactcgaatcatctccttttctggtatatctaggcagtacagtcatccctcagtattggagggattacttccacgacccctgaggataccaaaatcaggtgatcttcaagtcccttatgtaaagttgcatagtacagccatacactgcataatgacattttggtcaacaatcagatctatgatggtggttccgtaagattacactgttacactggagatgagaagttcctgttgcctagctacatcagagtagtcatgacgtcatagtgcagtgcattccttgtgtctgtggtgatgctgggggaaacgaacctagatcgttgccaggcagctttaacctgggtgtgggtgaggatgacactgtgatgctcctagaggtggttcatgaggaatggacgaataagtggttggaactgatatgagaacacatagctgaagaagaggtgagaagataggaaagtgaaggaaaagaaaaaaaaaatccaggaactttcacagtgaagggtttagcagaaacttgtacagacctcaacaagcttcttaaaaagtttgaaaacatgaactccaacaccaataggtgtttatttatttattttatttttatttttatttttttttggagatggagtctcgctctgtcgcccaggctggagtgcagtggggtgatctcgactcactgcaagctccgtctcccgggttcacaccattctcccacctcagcctcccgagtagctgggactacaggcgctcaccaccacgcccagctaattttttgtatttttagtagagacggggtttcaccatgttagccaggatggtctcgatctcctgacctcgtgatccacccgccttgacctcccaaagtgctgggattacaggcgtgagccactgcggccagcttattttattttttgagacagagtctcactctgtcacccaggctggaatgtagtagtgtgatcttggctcactgcaacctccgctttctgggttcaagcgattctcctgcctcagcctcctgagtagctgggattacaggtgcctgccactacacccggctaaagtttgtattttgttttttttgtttttggttttttttgagatagagtctctctctgttgcccaggctcagctcactgcaacgtctgccttccgggttccagcgattctcctgcttcagcctcctgagtagctgggattacaggcatgcgccaccatgcccagctaatttttgtatttttagtagagacggggtttcaccatgttggtcagtctggtgtcgaactcctgacctcgtgatctgcccgcctcggcctcccaatgtgttaggattacaggcgtgagcatggggcccagactaacgtttgtatttttactagaggcagggttttaccattttggccaggttagtctcgaactcttggcctggtgtgatcagcctgcctcagcctcccaaagttctggggttacaggcgtgagccaccacacccaaccccaaaaggtgtttattaatagaaaggaaagtttatggtgcattacctgctcacaagaacatttaggaagaaaaaataagcaagtaaaccaccatagatatttttcttcctctctcgttttcctaatcagctgatttatttttttattttttgagaccgagtctcgctctgtcaccaggctggagtacagtggtgcggtctcggctcactggaacctccacctccagggttcaagcaattctcctgcctcggcctcctgagtagctgggactacaagcctgtgccaccactccgagctaatttttgtatttttagtggagatggggtttcaccatgttggccaggatggtcttgatctcttgacctcaagatctgcctgccgcggcctcccaaagtgctgggattactggtgtgagctactgcaccaggccctcagctaactttcagattcacaccacagacatatttctgaaaggagtgccttctctcctagaagagcctcgggcaagttcttcaagaggtatccagaagaagtcattgttatcccagatgacagctccatacatgttattgctcctgaggaccttccagtgggacaagatgtggcactggaagacagtgacattgatggtccccaccctgtgtaggcctaggctaatgtatgtgtttgtgtcctggttgttgacaaaaaagttttaatggggaaaaagattttaaatgggaaaaagcttatagaataaagacatgaagacaaaatatttttgtacagctatataacgtgtgttttaagctaaatgttattgtagaagtcaaaaagtttaatttagaagtttataaagtcaaaaagttatagtaagctaaggttaatttgttattgagaaaaaaatattttttatgttagtgtagcctaaatacacagtaagtatgtatttatttttgagacagcctctcacactgtcgcccaggccggaatgcagtggtgcgattatggctcactgcagcctcaacctcttaagttcaggtgatcgtcccaccacagcctcctgggtagctgggactacagatgtgttccaccatgccttgacttatttcttgtatttttttttgtagacacaggagtgttgccatgttgtccaaactggtctcgaaattctggagtcaagcagtctgcctgcctcgttctccaaacgtgctgggattacaggcatgagccactacgcctggccaagtattcggtatttataaaatctacagtagtacacagttatgtcgtaggccatcacattcggtcaccacacactcactgactcatccagagcaatttctagtcctgcaagcgccattcatggtgagtgccctagacagctgtaccattttttaaacatgtatatcatattattattgtaccttttctatgtcgagacatgtttttatttacaagtacataccattgtgtcacagttgcctgtagtattcagtacataacatgatgtacaggtttttagcaataggctataccatataccctaggtgtgtagtagactataccatcttggtttatgtaagtgcagtctgtaatgaaatggtctgaaaacacatttctcagaaccggtcccattactaagcagtgcatgactgtatttgcatataaattacacatgtcctcccgtagactttaaatcatctcttgattacttataatggattatttttaatggattaatgaaatttataaatgctatgtagttgttatactctgttgttttcttgtattattttcattgtttgttactttttggtttctttccttttttttgtaattatttcagtctgtcgttggttgaatccctggatttggatcctagaaatactgagactgagggccgagtgtagactctatctgctcattagtcagtgaatagtcttctttttgatctgctccacttttggggtacctcagtccttttgtttaacccttattttacttaacagtattccccaagcacgtgaatattgatgctggcaatttggatgtgccagtaagaagctgtcacatgcataatttaagtggagtaaatagaggtcagtactgtttgaggttccaggcatccactgggcatcttggaacatatcctcatggatacggggattccagtgtgttctgtctctggcgctgagcaccaacgctctgtgtcctccatttctgagggcttacatgagcctgggatccatagagaggggaggaggggctgtgctcttcatggagtttggtcacagctgtgtctcttccctgaatggggcagctcagtccagcctagctccctactgctgtagcgtgtgtgcgggcttctccaggaggggagcgagtcctgaataaaagagtaaaaatttcactcattcttcctgtaggaatttcttgtccctgcatcaactctggtgcagtgggcaacagaggacatctttccgcaggattaggtctaacctgtgtgtgtggttgtggcatagggaggggaatgtgttgattccgagcagtaatcagtgtatttttgacatttaggattgacttataaacagtcatgctatgtgatgaagaagcccagaagaggaaagcaaaggagtcagggatggctcttcctcaggtaaagtgatattctcggtggttggttctctctgtttctttctgaaatgcctgaagcatcctgcctgacacgtttgctcacactcacccatgccttccctcagtccctttcatctcgcttagattctatctctcgtgacccagtgacatgaatgtgggaagagactgcactgggcgtggtcctgggaagggctcacacccagacatggatggagacggggtgagggtcccgtggtgtcagtggtgttgggcagcagggattgttcaggggccacatctggatgcactgtcagctctctgtggaccaggattagagaggctgccaatggaagtcacgtatttttttttttttttttgagacagagtcttgctgtgtcacccaggctggagtgcagtggcacgatctcgactcgctgcaacctccgcctcccgggttcaagcaattctgcctcagcctcctgagtagctgagattacaggtgcctgccaccacgcccagctaattttttgtatttttagtagagacggggcttcaccatgttggtcaggctggtctcgaacccctgacctcgtgatccacctgcctcggcctcccaaagtgctgggattataggcgtgagccaccgcgcctggcctgaagtcacatattaatgcacacaagtacctggtacattctggaaaaggagttcaggaaggagaaatcttttctgtctgatttttactacatttgaagctaaacacctttcctactttctaatgtctggcttggttcagagaggacattctctcttctttctcagcatgcccctcccatggagactggtgttcctgcagggagtcttgtacagcatctgtgttaggtgaaaaaagctgtaattttgcacagagattggagcataaattttttgtcattaaagaggtggaaattatattcattcttgttccagcaattagttatttttttatgttaaacatcaaattatgtatatatttgttttataggaagacaccacacatgcagcttaggccatcaaatacgaagcctcccctgccctgccctgtgcagtttcccaccctccctgcgtctcactggtgacccactgctgtcagctctgtgtcaagagtgagagcatgtcctgtagaaatatatttatacagcattggccgggcgtggtggctcacgcctgtaatcccagcactttgggaggccgaggcggacagatcacctgaggtcaggagtttgagaccatcctggccaacatagtgaaaccctgtctctactgaaaatacaaaaatcagcaaggcttggtggtgggcacctgtaatcccagctaccacagaggctgagacaggagaattgcttgaacctgggaggcggaggttgcagtgagccaaggtcacgccactgcactccagcctgggcgacagagcaagactgtgtctcaaaaacaaaacaaaacaaaaaaaacctatacagcattataaggctggacgctgtggctcatgcctgtaataccagcgctttgggaggccaaggtgggtggatcacctgaggttgggagtttgagaccagtctgaccaacatggagaaactccatctctactaaaaacagaaaatgagtcgggcatggtggcacatgcctgtaatcccagctccttgggagactgaggcaggagaatcgcttgaacccgggaggtggaggctgcagtgagccaagatcgcaccattgcacttcagccttggaaacaagagcaaaactccaaaagaaatatatttatacagcattatggtattttaaataaaatcctcagtgattgtttcgttgtaatattttataccaaaagttgtgaaaatttgcatgttttcatgttaggaagatggattccttgctcctttacatcctcatgtgaacgttctctgaattagaaattagtcaccttggcaaggtgcagtggctcacgcctgtaatcccagcactttgggaggctgaggcaggcagatcacctgggctcaggagttcgagaccagcctgaccaacatggtgaaactctgtctctactaaaaatacaaaattagcctggtgtggtggtgcacacctgtaatcccagctacttgggaggcttaggcgggagaatcacttgaacccgggagatggagtttgcagtgagccaagattgcgccattgcactccagcctgggcgacacagcgagactgtctcaaagaaaaaaaaaaaagaaagaaatcagtcacctctctttttttttgtgcctggcgtggttcagggaccatgtgtgccattcagcccaggaggagtctctggaggtcctgagctttgtctaggatgcatcctctctggactttgcttgtcacctcctcactgaagagggtggccaggttctgctcaggagcttccctttctgcacctgctctgcagcctgtgtgaggccataggaagctggggtccgcaccgccacctagtatctgcccgtgtaactgcgggctctgatttatgctgatgcctttgttctcagtggcttcctgatctggggccctgttacttcagtgcttctgttcaaccaagacagaacgttgtccctcaggagaaatctggagtttgtggtttcctctggatgatggcgcgtcgtgcctgagcaggggctcaggctaacgtgttcatgcattttcccactgggctcccagcaggttgacttggtgcttctttggggtgcaggaacttgctaaggaccttctggatttctcacaaagccaattggtctgtgtactgtttaatttttgtctccagggggacagaaaggtctgtggcttcgcattcctgtgtcttgctgacattactcttttagtagagttgcgaatttcttacacaggtctggagtgtcttttagttaggggccatgtgtatatttgctgagggagaggtaggatgtttcttgtgtgtgtgtgtcatttataattagtgctgctgaagaaggaaacttgttttctttttttattttttttgagatggagtgtttcactcttgttgcccaggctggagtgcaatggcgtgatctcggctcactgcaacctctgtctcgcaggttcaagcaattctgctgcctcagcctcctgagtagctgggattacaggcatgtgccaccacgcctggctaattttgtatttttagtagagacgggatttctctgtgttgatcaggctggtctcgaactccccacctcaggtgatccgcccatcttggcctcccaaagtgctgtgattacatgtgtgagtcaccgcaccgggccaaaacttgctttcaatatattcgtattagttaatacgcctaaatggcattctttgttatggttacaatcctgtcattcgttagttctaacagatcctgctttttcctgcctcctacccccactttttttttcctgttttttttcctctgcttctggtccctgctcaggcatcctgtgcagtggtaattggctgcagcacagaccagtgccctgtttctggccttaaattagaggaaatgcatcccacgtttactgttgattatgatgttttatgagatgttcttgtttaatatcatgttttttttgtttgtttgttttccaatttcattcttggcctgagtattaattatctagtaatttcttaaggtatgtcctgctgagatattttctttgacctttatttgtttgtttattttttgagacggagtcttgctcttgtcgcccaggctggagtgcagtggtgcgatctcggctcactgcaacctctgcctcccaggttcaagcaattctcctgcctcagcctcccaagtagctgggattacaggcgcccgccaccatgcctggctaattttttgtatttttagtagagacagggtttcaccatgttggccaggctcgtctcaaactcctgacctcaggtgatccatccacctcggcctcccgaagtgctggagttacagacgtgagccactgcgcccagcctatttgttaaattagtgtataatattcttaaattttgtatcatgtatcactgttttattaatgaaataaatcaataaactccattgggcttttgctaatacctacatatgtaaattttaatggacaaaagtgtatttataggccagggttagtggtgcatgcctataatcccatcttcttgggaggctggggcaggattaaactcttcccatgaacccaggagtttgagatctttctgggcaacctagtaaaaccccatctgaatttttaaaaatactacatatttttgaatgtgaacatttactagagattggaattgaagtttctatgttttttaatgatctgccatttttaatagcttaatattcaaaaatgtttatcaactaaattgagtacaatttctacatttttagtgttgtaaacaatgtggtcctcattttagggacgcttgacattcatggacgtggccatcgaattctctcaggaggagtggaaatccctggaccctggacagagggctttatacagggacgtgatgttggagaactacaggaacctggtctttctgggtgaggatgacttccctccagaagccgggatctgctctaatctgtctttgcattttctcttgcgtgcctcttgggagcccctaaattgcttaactgaggtagaaaccttgttgactcagaaatgaaaagctctattatgctctctggatttgaaatgcgtcctttcttcagatgtaccgcccccttcataatacatcattgggtggcaccggataaccagttctctgttttctcccctgtgcttacaagtcagtagttcttggaagagatctcagtgtctacatattgcatattccctaagcattcagaaggagccagtctgtgggtgaacttgtgagatattattcttgatccatttgcgatatcccctctcttacctaaacacagggtttgggttttggaaatgccccagcacatcttgtttctttctttttattaacaggaatctgtcttcctgacctaagtattatttccatgttgaagcaaaggagagagcccttgattctgcaaagtcaagttaaaatagtaaaaaatacagatggaagggaatgtgtcagaagcgtgaacacaggtaagagctctgatgggcagtgtggaggccatagtttttatttttttatttttgagccagggtgttccgctatcacccaggctgtagtgcagtggcaatcatagctcactgcagcctcaaactcctggactcaagcaatcctcctgccttggcctcccaaagttgtagattatagccactgcaccttgcaaagccatactattttttttttttttttttttttttgtctcactccgttgcccaggctggagtgcagtggtgtgatctcggctcactgcaacttctgcctcccaggttcaagtgattctcgtgcctcagcctccccagtagctgagattacaggcatgtgtcaccacacccagctaatttttgtgtttttagtagagacggaatttcaccatgttggacaggtgggtctcaaactcctgacctcaagtgatctgcctgcctcagcctcccaaagtcctgggattacagacgtgagccaccacacccagcccatactaactattcaagagtgtgtgggaaactctccaaaggtgggagagttctgtgagaaaagaaaagtttaaatcctaggcattctgaatggaaatatttctttgctctctcttgtcactcagttctataaatgtgtgatagtttcatcttttcaccctcgagtggtgttgccacccagagacaaaagcaaagtctttatcctgatggacagcaccctgtcatgtggcttctgtgaacttttgttccatgattctgaagaacacagggagcattgttgccaggggtctctttcccctgtggtctttcttcctgtacttgattccatctgatgcttagtttctgtccctgtaggtcaaagctgaggtcttcatagacctgcccccttgacctattcatggtccaccccatttcctgtaatgggaagatgtaatcaggaaatgagagaacatgagctactcttttttgcatctgggccctggaaactacaggtgcctccagccccctctgcctgttcaggtctatttggatgggaagaagccagtgattttcctattctcacatgccactcagcacagagcatttcacttctggtcaccaaaatgtgtggggatttctccccatcggcaatttttcactggatctttactgggttttctataattcatttctaacactgtctacctggagttagaatcagatcccacaggctaagggttgggttcccaagcctgtcgcccacctcagccaccacttgttagtagtagattgtcacctttctgtctgaccaacacagctgtaagctgggttccctcgactcccttcttgggttgattactttgctcgggtggctcacagaactcagtgagacacttcattaggttcactggttcatgatgcaggatgtttctaaggatacagatggacagccagatgaggagattcacagggcgaggcacgtgggaagattgactgggtgtgccgccctccaggcgcctgtgtgtcttcagcatttggaacctcttgtgaccccatagttcacgagcggcttcatcacgtaggcgtgattgatattaactcaatctccagcccctctcctagaagctagtgggtggggctgacagtttcatgcttctaagtatggcctggtctttctggtaatcagccccatccaaggaacccacaaaggttgcctcattagagcagatcacactcgtaccacccaggacatctcaaggtcttcagagctctgtgtcaggaaccggggaagagaccaatgtatgtatgtattcttattccacaaggcccctcagccattcttcagttgtgcttcatccacactttactggtgtgtgtcacaggggagtaggtggctcttctgagatgcttactcagctgagtggggcagatagtcaacagaaagaccctgtattcgatccctaggtccccatggggaacatggcacaaaatagcaaccagatgcttctggttttaacactaccatcatttgttcaaaccactgttactttcatcttgtacctttccatgtattataaattaacttggtttttgtatatttagtcagcagttccatatttcatataatactctttgtgtttattattttgtatctgtagggctgtagtatcagggaatggccattgatttatatatttttgagtgtggtttttttaaatgcacagggtatgcctcagcaggagagtctctaaaactgacactccagaaatttttgaataggagtttaaatatttgttttcctttgttgtacgtgacttagtagctactattgaacaacacttttgccaattaaatgtattacagtgtataatatggaaattttttatatcttaagaatatgctgttttaaaattgttgccatcttaatctcagaaataccattacactgacttgccgtaatttgttatttaagactgaggggcaaaactcaaaccgtatcttcctctgtctggtcttgcaccacgcaacaataaacacagacaacttatgtcaccaaatgtgagttttacttccaccaataagcaatcagttctgcagtggctacttgctgggggcccttgaattctattctgatgctgtgtacctggagagcgtgtcacatgccacaggttgagggctcagtctccaatactgccccctttcagacacgggtcataagtccaggcctctggaactttcgaccaactggcttcaaaagttggggttcccatggctccctctttgggtttgattaatttgctagagtggttcacagatctcatggtaatacatacttaacatttacagggtttattccacagcgtattttaaaggctccaggcccggcatggtacctcatatctgtaacccaagaatttttggaggctgaggtgggcgcattacttgatcccaggagtttgagaccagcaacataatgagacgttatctctacaaaaaattaaaaaattggccgggcgcagtggctcacgcctgtaatcccagcactttgggaggcccaggcgggcggatcacgaggtcaggagatcgagatcatcctggctaacatggtgaaaccccgtctttactaaaaatacaaaaaattagccgggtgtggttgcagacgcctgtagtcccagctacttgggaggctgagcccggagaatggcctgaacccgggaggcggagcttgcagtgagcggagatggtgccactgcactccagcctgggagatagagcgagcctccatctcaaaaaaaaaaaaaaaaaaaaaaaaaaatttaaaaaattagccaggcatggtagtacacaccttgtagtcccagctactcaagaggactgctcgagcccaggagtttaaggctgcagtgagctatgatcgcgccactgcactgcagcctggctgacacagagcaagaccttattccaaatagatagagaaggataaattaacagatggaaagaacatagggtcaggtctggaagggtccccagcacaggagcttctgtgtcctggagttggcttgtgccaccctcctggcatgtgtgtgagttcctgctcaccttcctgtcagcctcggggtgttcagctgtccagaagctctctgaacccagtccttttgggtttttatagaagctttattatataatgaagttacatgatataacttcattatttgtctttttgtctttgtatgactggcttatttcacttaccagagtgtctttcaggttcatccattttgtagcatataaagaaatttccatatttttttaggaacaaagaatgcttcttttgctttctttttttgagacggagtcccactctgtcgccgggctggagtgcggtggcgcgatcttggctcactgcaacctctgcctcccgggttcaagcgattctcctgcctcagcctcctgagtagctacaactacaggcatgcgccaccatgcccagctaatttttgtgtttttagtagagatgaggttttaccatgttcaccaggatggtctcgatctcctgacctcgtgatccacccacctcagcctccaaaagtgctgggattataggcgtaagccactgcgcctggcctcctttttctatttgttaatcaggttactggttttctgatttgtaggagttttatgtattttagatatataaaatcttatcagaggtatgatttgaaaatattttctcacatatggtaggtttccttttcactctggtaattgttttcttccatccacagtagttgtaggtcttgtggtagtacattttatgtatttttaccttctttcttgtgttatcagtgttctatccagggaagcattattgaatccaacgttatgaagctttccacctgattttttctaggagttttatggttttaggtcttagttttaggtcatgaattggctttcagataatttttgcatacggtgtaataagagttcaacttcattcctttcttgtggatatccagtttcctcagcactatttgataaagagactgtcctctctcgttacatggtcttggcagccttattgaacatcatttgaccaaatatttgagggtttgtttctggcctgtctgttctagtccattggcttatatgtctgccttcatggcagtacagttctattttgatgaaggtagcttagtaataagttttgtaatcatgcagtgtaacacctccagctttctttctttcaagtttgttttgctattgaggcacatgtgtgatttcatattaattttaggatgagtttatttatgaagaaaacttccttgggattttgctaaagagttcactgaatctgtagatctctttggctattgacatcttaaccttaagacttacaatccataaacatgggctgtttttgcatttgtgtgtgtcttctctactttgtttcagcaattttttgtagatttctgtgtacaaatttttcccgtccttgttaagcttattccctccatatttggaggttttgcatctacagattccacaaaattgcagatcagaaatccacaggtcattgaatctgcacatatggatcccatggatacgtagggcagactgtattttcaatccatggttagttgaatctgcagatatagaaaccacaggtatggaaggcctgcagtaaggaactcaggcatccacagattttgatatctgagagtgttttaagaaaaactctcaaaccatgtttttcctctgctctcacgccaccacaacaatctgtcaagacagaataagacttccgtgaccgacggtataggagttttttcccacacatcaagcaacggacaagagctgggtttcctacagttcagttctgacactatacctggagatagtgtcagatcccacgggttgagggctcagtgtcaaaggcttcccccatttcccaccagttacgagtctgggcctctagaacttctgaccaactagcttccatttgtggtttctgtggcccctctttgggctcgataaagtttctggattgtctcacagaactcacagaaacacttacttacatttgccagtttattataaaggctattgaaaaggatacagatgaagagacctgtagggcaaggtatgggggaaggggtgtggagcttctctgccctccctgcgaccagcatccaggaagctccatgtgttcagccatctggaagctctctaaatgcagtcctcttagatttttatagaaaccttattatgtcagcattctttcccccagacataaagcaggaccctctctcgggaggtcttaagacctataatcagaaagatgggagattagagttctgccttgaggcaggtgaatggagggcaggaaaaggttggagaggttctgtttcctgagttctgccctggggcctaccgtacccaacactataacagaagactgtagcaaaggctatgggagttatgagccaggaactgcagatgaaaacaaatatatatgtaataccataacaccacacaggggttcctggaaccagtcttccctggacaccaagggacagctatattctcaatagaaataatgcaacatgggctttctttttattttttcctaattatgaaggaaaagccttcattatttcaacactgagtatgatgttaccttttggctttttatataaggcttctgtatgtaaagtagattcctcgtattcctaatgtgtagagtgtttctatcatcagtagttgttgatgtttttcaaatgttttttctgcatctgatgagcctatcaagtgggtttttgtttttattctgtttttgtggagtattgcagggatcaatgttcctaagttgcaacatcgttgcattccaggagtgactttcacatgatcatagtgtgtggtccattttaatatactgctgaacttgcttgctagcattttgttgtggatatttgcattagattgatgaggaatattgctctgtagttttcttagagcctttgtgtgccttttctgtcaaggtgacactagccttattgaatgagagagggagtgttttgtccatcacatggaacatttttaagagtgttggtgttaaatcctttttcagtatttgatagcgttttacagtgaagtcatctggttcattacttgtttttgttagtagttatttgataactaattcaatctccttatttgttactcgtcttagtgtttctacttcttcatgagtaagtcttggtgagcagtgtgtatctagaaattcatccattgttgggacacagttgtacaatctcattttcttttttttttttttccgagacagagtctcgctcttgttgcccaggctggagtgcactggcgcgatctcggctcactgcaacctccgcctcccaggttccagtgattctcctgcctcagcctcctgagtagctgggattacaggcgtgcaccaccaggcctggctaattttttgtatttttagtagagatggggtttcaccatggccaagctggtcttgaactcctgacctcaggagatccacccgcctcggcctcccaaattgctgggattacaggcgtgagccactgcgcccggccacaatctcattttctacaattcagttttatttgtaatgtcctctattccatttctaagtttacttatttgaggcttacgcttcatttttgttttgttgtttatctagctaagggtttgtcaatctttttaaaatttattttaatttaaaaattttttttttcaaaagagacagaggtctcattatgttgctcaggctgatctcgaactcctgagctcaagtgatcctcccgccttgccctcccaaagtgctaggattacaggcgtgaaacactatgcccaactgtcaattttcttaccattcgaagtatgagcttgcagtttcatgactttagtgcttctctcttctgttttctaatcttaattttttctttctgctacctttctatttagtttggttttttttatacttcattgaagtataaagttagattgtttacatgtaactttatttatttattttagtgatgaggtctcactctgtctcccacattggagtgcagtagtgcaatcatagctcaattcaaccacaaactccgaggctaaggtgattctcttatctcagcctcctgagtagctaggactacaggtgcatggcactgtgccttgctaactaaaaaataaataagccagcactatggctcacgcctgtgggaatcacactatgggattacgcctgtaatcccagcacttcgggaggccgaggcgggtggatcacctgaggtcaggagttcaagaccagtctgaccaacatggtaaaaccccgtctctactaaaaatacgaaagttagctgggcatggtggcacacgcctgtagtcccagccactggggcggctgaggcaggagaatcagttgaacctgggaggcggaggttgcagtgagccgagatcgcaccactgcactccagcctggtgacagagcgagactccatctcaaaaataaataaatacataaattttgtagagatggtgtcttgtattgttgcctgtgctggtctgcaactcctggcttgaagtactcctcatgcctcaaactcccaagtgccgggattatagatgtgaggcatcatgcctggccatttgtttatttttaatgtaagcacacatttttgttgcattttataagttctggtgtgttctgttttcctttccttttctatcaagatattttaaaaatcagtttgtggtttcttttttgacctattggttttttagatgtgttgtttcatttggacatatctgtgggttttacatttctttctgttaattttgttttattacattataatgggaatcaatactttgtagacttctaaatgtttaaaagattgttttgtgtcataacatgaagtccatcctggaaactgttccatgggcacttccgaaaaatttgtattctgctgtttttaggtgatgtgttgtgtatacgtctgtcatatctaatgaggctatagtgatgtttgagtcctgttttcttcttcttctctttgatttttatttatttatttttattttttagttttaaggagcagggagtttaataggcaagaaagaagggggaagaaagaaagaagaagctcccctgtacagagacagagtgaggggggctccaaagccgagagacagaacccccttctctttggttctatccccttttttttttttttttgagacatagtctcaccctgttgcctacccaggctggagggcaatggtgtgatctcagctcactgcaacctccacctcccaggttcaagcgattcttatgcctcagccacctgagtagctaggattactagaatgcaccactgcatccagctaatttttgtagttttagtagagatgggggtttcgccatgttggccaggctggtatcaaactcctggcctcaagtgatcctcctgcctcagcctcccaaagtgctgggattacaggtgtgagccaccctgcctggtcaccttgttctatccatttttgaaaatgaagtattgaagtctactactatatcgtggagctatctgtttctcctttgaattttgtgaatgtttccatcctatacttaggggctgtgatatttggtgcctatatatttatagttgttatatcttcttggtgaattgaacccttcatcattgtataataacttttctttcttatactggttattgagtaaacgtctgttctctttgattttaatatagacacctctgtgctctgctggttactatttgcatggaatatccttttccatcctttcagtttcagccaatttatgtctttagagttaaagggagtctgtcgtggataggatttagttggatcctgttttgttctgattccaatgggaaatcatttgtatttcacatactcatagagaaggccttaatagtgccatcttgtcacatattagctgtagattttgtaacatcttgtagatttttttgtccttcatttttcccttactgcctgcttttgtattttgttggttttttaattgtgacatgctttgatccccttctcatctcctctggtgtatgtttgtagattttcctcttgtggttaagattgaagttacataaaacattgtaacaataaaacattattttaaaatgtcaacagcttaaccttgattaggtaccgaaagcattacattatagctgtgctatttgttattgtgctagaagttccttctatatatgtaatattcccattaacacattttagtgctttttaaataattttgcctttgaaatgctaggaaagaaaagccaaattacaaatgaaaagtacaataatgcatgatttttttgttttcttttttaatttttttctcatacagtgtcactctcaggatactatgtttccatatttgatcatttattgacctttaatggagaactttatattttcatttgggttagaagtactgtctggggtccttttatttccttttgaaggattccctttaacatttcttgtcagacagttccaaggtactaattaccttcctcagctcttctttattcaggaacgtgtaaatttctcctttatttttgcaagcaagttttgctgaatatagtattcttggttttttgtttgtttgtttgagaaggagtctcgctctgtcgcccaggctagagtgctgtggcgcgatcttggctcactgcaacctccatgccccgccttcccccatgtgaggttcaagtgattctcctgcctcagccttccaagtagctgggattacaggcatgtgccagcacagccagctaatttttgtgtttttagcagagatgaggtttcaccatgttggccaggctggtcttgaacttctgacctcaggtcatcaatccacctcagcctcccaaagtggtaggattacaggtatgagccactgcacccagccgtatttttttttctttaagcactttcaacatatcatcatcttactgccttctagcctgcaagtttgctttaagatgtttaatgataggctgggcacggtggctcacgcctgtaatctcaacactttgggagaccaaggcaggcagattgcctgaggttgggagtttgagaccagtctggccaacgtggtgaaaccccgtctctactaaaaatacaaaaaaattagacgaacgtggtggcgtgcgcctgtagttccagctacttgggaggctgatgcaggggaattgcttgcggaggttgcagtgagctgaggtggtgccactgcactccagcctggggcaacagagagagactccgtctcaaaaaaaaaaaaaaaagaattgtgacaggtgtgacagggagacctttcccaattagcctgttgtaaagggtgtgggaacacctcactcctgggattgtgtctctcctagctttatgcgtatattatactattactaatgtctatacaactgctcttaaatgtcttattttctctaagaggctcatccctgctttttctgagaagctttcagtttctgttctatttttctgcccttaatctttctcaaagtcactcataatcctcccgagtcctgcagattccccactgctccaatgcatcacgtcacccccttgtgttttcagctctcacaatgtgacatgcaaagtatgccgatacttcttccagtgtctgagttgggtgaggctgattctggtccctccaccagacggtaaacatgccagaatcatgggttcatgttctactctttcttcttttctagggaggagctgtgtattgggaagcaatgcagaaaacaagcctattaaaaatcaacttggattaacccttgaggcacatctgtctgaattgcagctgtttcaagccggaaggaaaatttacagaagtaatcaagttgaaaagtttacaaaccatcgttcctcagtttcaccacttcaaaaaatttcttctagtttcacaacacacatttttaataaatatagaaatgatcttattgatttcccattactcccacaagaagagaaagcatacattagaggaaaatcttatgaatatgaatgtagtgaagatggtgaagtttttagagtccgtgcaagccttactaaccatcaagtaatccatactgcagagaaaccttacaaatgtactgaatgtggcaaggtcttcagtcgcaattcacaccttgtagaacattggagaattcatactggacagaagccttacaaatgtagtgaatgtgacaaggtgtttaatcgcaattcaaaccttgcacgacatcaaagaattcatactggagagaagcctcacaaatgtaacgaatgtggcaaagcttttagagagtgttcgggacttactacccatcttgtaatccatactggagagaaaccttacaaatgtaatgagtgtggcaagaacttcaggcacaaattttctctaaccaatcatcagagaagtcacacggcggaaaaaccttacaaatgtaatgaatgtggcaaggtctttagtctgctttcataccttgcacggcatcaaataattcatagtacagagaagccctacaaatgtaacgaatgtggaagagcatttcacaagcgtccgggccttatggcccatcttctaatccatactggagagaaaccttacaaatgtaatgaatgtgacaaagtctttgggcgcaaattatacctaaccaaccatcagagaattcatactggagagagaccttacaagtgtaatgcatgtggcaaggtcttcaatcaaaatccacacctttcacgacatcggaaaattcatgctggagagaattcactgcgtaccttacagatggaatgaatgtggcaaaatctttagttagaattcacacctagcacaacattggaggactcaggagaaaaaccttacaaatatcataaatgtggcaaagaatttagtttgcattgaagcctcatcactcatctcttgatccacactgaaaggaaaccctacaaatgtaaagttaataacatatataaataatctataaagagagaacagttatatcagaatagagcatttaatgaaaactaccagtatagcatattcttgagtaggattcacatttaactgctggcaccgtaatttgtaactctttgatttagaatgtacatacttctcatgttttaagtaataaagtttaaagtttttttttagttttttcttttttttttgagacgaagtctcgctgtattacccaggctggagtgcagtggcatgatcttggctcactgcaacctccgtctcccggattcaagcaattctcctgcctcagcctcctgagtagctgggattacaggcatgtgccactactgcccggctaatttttgtatttttagtcgagacggggtttccctccgttggccaggccggtttcaaactcctgacctcaagtgatccactggccttggcctcccaaagtgctgggattataggtgtgagccacagcgcccggcctagtttaaatttttcttagtgtgaatgaattacatcctttctaccagcgttgtttaatcttacctcaggaggatactttatagtagagaataataacccattatgattttaaggttgaagcagccagaaaagtgtgtgtgtgtgtatgtgtgtgagacataaaacaacatacgcttctgggtgcaatatacttaagtaagtatgatgttgagtaattacacttagtacttgagttagtttctctgtactctggtgtaggatgtttatgtgggtaaagtcaaaatcactttaatagtacaatttcagccttgtacaccctcaaatgtgtgtgagtgttaaagagtatgccctgtattgtgtttctacatgcctctttcttgtgtgccaaataagaactatggtgtgcaccttcattttcatgcagcaaaaatatatagtaatatgacaaatattaggaaataaagtatgggttgagggcaaaaatactgtaacatggccgggcctggtggctcacgcctgtaatctcagcactttgggaggctgcattgggtggatcacgaggtcaggagattgaggccatcctggtcaacatggtgaaaccttgtctctactaaaaatacaaaaaaaaaaaattagctgggcctggtggtgtgcacctgtaatcccagctacttgggaggctgaggcaggagaatcgcttgaacccaagaggcagaggttgcagtgagctgagatcaccccactgcactccagcctggtgacagagcaaggctccgtctcaaaaaaaaaaaaataataataatactgtaacacaatttctttttgtacttctagtgttcagtgacatcatttgaaaatattaatgttcacccatcttctttttaagtcacacacagaaagggaattttgttttggtacattaactagaaacttcatatagtcaccctcacaactcttttggtaatttgaatttttgaccactcttctggaacttgtttgaagtccccctaaggtttggcttggatcttgagaatgatgatcccatacactgatatggtttgagagtgtttattatataatgaggctctgtgggggaaagcagggtatacttttccagctggtccaaaagtggcttcagagaactgggataggtgactggcttggggtgtcatgattgctaaagggtagggctggggcggggatacccactacccatactggaaacttagttacaattcacacctagcatgtatatttttatattttttgtatgtatatatatttttacatttttttcctacattgcctccaaattctatgtttaatacatttcttccctgttttgctctggtgaaaactttaggggacaaataaatgagtgctgtttggagacaaaattttgtgacatgggactgggcattgtggcgtgtgcctgtagtcccagctacttgggaggctgagatgggaggatcacttgatgccaggaggtcgaggctgcagtcagtgagctgtctgcacttcagcctgaaagacagagggagaccatctcaaaaaaaaaaaaaaaaaaaaaaaaaaagttgtgacctgagtatgtccataagacaatggcaggtatacactaggattaatataaatatgaaaaaaaaaaaaaaacttggccgggtgcggtggctcacgcctgtaatcccaacattttgggaggccaaggcaggcggatcacgaggtcaggagttcaagaccagcctggccaacatggagaaaccctgtctctattaaaagtacaaaaaagtagcccggtgtggtggtgggcgcctgtaatcccagctactcgggagactgaggcaggagaatcgcttgaacccaggcggcggaggttgcagtgagccgagatcgcgccacttcactccagcctgggcaaaagaacgaaactctgtctccaaaaaaaaaaaaaaaaaaaaaaggaaattgcacattccgccctggcagggttttgcatttcatattttaatttgcatccccttcataaacaattcaaggactttaaaattccggaaactagtgtttattattcatttatatttatttattttaattatttatttccaatttgttatttatgattatgtatttattaggcgcaaggtttctctctcatgcccaggcgggagtgcagcgcacgacctcggctcactgcagcctccacctcatgggctcaagcgatcctcccacctcagcatccgggtagctaggaccacatgcgagcgcccctacagccgatttaaaattaattttaatagcaggaattttcctggatctaatcatcaacaaactttccctctgccgggacacaatctatttccagatagctgagttcttccagtctccacggcaggtctagcctccaaaacgagacgagctgggagcgaggcggagggaagcgcaggctccgcccaatcccacccgggcctggcctcgcctcgcctctcagctgcgcgcgcagtttcctggagacccggaagcagattacgtggagtgacggtcatgctgcggcgtgtgagtttccctttgtttagattaaatctgggatgctgagtcccctcgcgcttctgtacccggcatctcaggggtcacacagaccttgaaatccccgcatcgctccctccaccccgactaaactcagacgttctaatgagagtctggcggtcgcttccctgagtgttaaaatcgctcggaggctggtcctgtccccggtctttcaccacagggccatgtagacagctcctgtcgcggagtttgcctgcttcaaatccttcagtgacccctagacacggcccgcgctgcgtaaagttctcacccgcgagatggatccacgtctttccggtcccccaagcctcgccctcttttcacaggcctgcccccttttctgtgccttaaatgagaggaaatcgatctgatgtttactgctgattgtgatgtttcagcctccattgggcttttgctaacacctaaataaatatttagtggacaaaattaggttagtgcaaaagtaatggcaaaccgcgatcacttttgcaccaacctaatatttatgggccggggctggaattccatcttctccggaggcccaggctggagaattccttgagcacaggagtttgagaccactctggacaacatagtgagacccccatctcaatttttgaaacatatgtttcagtacgggtatttaatagagattggaattctcgtttctatgtttttacatggtctgactttttgaaatagtttgaaataatgtttataaactgaattgagcacagtttatacatttttattgttgcaaacatgctgaaatgcacatttgcaaaaacaacgacagccaggcacagtggtgcacgcttgtcattcgagttactcggagagggtgtcatttgaggccaggaattcaaggctgtagtgtgccatgaataagccactgcactgcaacctggacacattaaaaaacgaacaaagacaaatatctaaaaaagaggttattgacagacaactctttcagttgtcacatatatgtttactagagtatatgtgtgtgaatgtatatatgtatatgaataagtgtgtacatgtgatgtgtgtggatgagtgcacagatgagcaagtctattgtttttatcaaaggcgcatcatcagtttatatacgtcttatatcttttaacagttgaaattacatcttatatattttcatgaccttaaaattgttctacactgttatgatagtgagtctatggctgtaaggatagtaacctgttatggggatacatgtgcgacagtttcttgattttaatcccggaacttattttaactatactcagttaggtcattgtctgtcaatttacttttgatgctgatctgttattgtttgatgtttttttttttctttttctgagatggagtctctctttgtcacccaggctggagtctcgctttgtcacccaggctggagtgcagtggcaccatctcaggtcactgcaaactctgcctcccgggttcaagtgattgtcctgcctcggcctcccaagtagctgggattacaggtgcccaccagtacgcctggctaatttttttattttcggtagagatggggtttcaccatgtttgctaggctggtcttcaactcctgacctcaaatgatccacctgccttggcctcccaaagtgctgggattgcaggcatgagccaccacgcctggcctaattcttaaagtttgattctaatgcccagactcctgggatctggcgcttactctgccatttttagccttcacacctggggcaagtttcttagaatgtctgagaaagagttgtctcttcaataggatgggaacagattgttcttttatgggcttttgttgttatagccgttagtacatgtacaacatttagaaagtgcctgtcacatgggaggtgttcaaaagcttcatcctggctgggtgaggtagcttacgcctgtaatcccagcactttgggaggccgaggcgggaggattgctgaggtcaggagttcaagaccagcctgaccaacatagtgaaaacctgtctctactaaaaatagaaaaattagctgggcacagtggtgggtgcctgtagtcccagctactcgggaggctgaggcagaagaatcacttgaacctgggaggcggatgttgcagtgagccaagattgtgccactgcactccagcctgggcaataaagtgagactccatctaaaaaaaaattatatatattgtatctgacgcttctatagaaataactgtgggttaattttttgtatttcttatgttgtccacaaaattagaaatctctactaattttttttttttttggagacagagtctcgctcagttgcccaggctggagtgcagtggcaccatctcggctcactgcaagctccgcctcccaggttcacgccattctcctgcctcagcctcacgagtaactgggactacaggcgcccgccactacgcctggctaatttttttgtatttttagtagagacagggcttcaccatgttagccaggatggtctcgatctcgtgacctcatgatccacccgccttggcctcccaaagtgctgggattacaggtgtgagccaccgcgcccggcctagaaatctatactaatttaaagaatatcaggttgggcatgcagtggctcatgcctgtaatcccagcactttgggaggccgaggtgggcggatcacgaagtcaggagatcgagaccatcctgtgtaacatggtgaaaccgcatctctactaacaatacaaaaaaaaaaaaaaattagctgggcgtggtggcgggcgcctgtagtcccagctactcgggaggctgaggcaggagaatggcgtgaacctgggaggcggaggttgcagtgagccaggatcgcgccactgcactccagcttgggcgacagagcgagactccgtctcaaaaaaaaaaaaaaaaaaaaaaaaagaatgtcataacttctaatggagaagtatattaaaacacaattagaaacatataactagctaaaaaaataccttaacgtggatttgtcagaacatccacttcaatcaagtcagtccttacaactgtctcctcattttgtgtgatatcctgttggtgaaatgtgtttttcattttagggacacttggcattcagggacgtggccatagaattccctcaggaggagtggaaatgtctggaccctgctcagaggactttatacagggaagtgatggtggagaactacaggaacctggtctttctgggtgaggataatgtcccttcagaagtcaagatctgccctggtgtatttttgcattttgtcgtgtgcctcttagcatcttaggagtcactgtattgcttgactgagattgaaaccctgttgactcagaaatgaaaacctccataatgctttataatgctgtatttttcagaaacaataagctccataatactttctggacttaaaataattgctttcttcagaattctggcccctttgagattcatcattgagtggtaccagggcttaagtatgcgtcaaaccttatgacagacttaagatatacagttctgtgttatccacccctgtgcttattatttattagttcttgtaagagagcttgatgtctgcatgttacaatgttccctcagcattcagaaggaggcagtggatgaattcatgtgaaatactgtaatttttttttttttttttttttttgagacagagtctccctgtgttgccaggctggagtgcagtggcaggatctcagctcaatgcaacctccgcctcccgttttcaagcaattctgcctcagcctcccgagtagctgggactacaggcacgtgccaccacgcctggctaatttttgtatttttagtggagatggggtttcaccatattggtcaggctagtcttgaactcctgacctcgtgatccgcccacctcggcctcccaaagtgctgagattataggcgtgagccaccgtgcctggcgaaatactattcttgattcatttataatatcctctctcctacctagacatggggcttgcattttggagatgccacagtacacatttattctttctttttattattattatttttttgagacagagtctcgctctgtcgcccaggctggagtgcagtggcgcgatcttggctcactgcaagcttcgcctcccaggttcacgctgagtatctgggactacaggcacccgccaccacgccccgctaattttttttttttttgtattttttagtagagatggggtttcaccgtgttagccaggatagtcttgatattctttctttttttaaataggaatctgtcttcctgacctgagtgttatctccatgttggagcaaaggagagatccccggaatctgcagagtgaagtgaaaatagcaaacaatccaggtggcagggagtgcatcaaaggtgtgaacgcaggtaagagcttggatggccagagtggaggccccataattttttttttttttaaacagggtcttgctctgtcacccaggctgtcgtagagtggcaatcatcagtggcaatcgtggcttaactcatagcctcaaactcctggtctcaagtgatcctccttcctctgcttccgaaagtggtgggattacaagcatgagccactgtaccctgcaaaaccacactttgagtttctgtttgggagctctctgcaagtgagagaattctttgggaaaataaaagtttaaatcctgtgagttctgattgaagtttgttttgtcttgttttgttgagacaagttcttgctctgttgcccaggctggagtgtagtggtggtgtgatcgtagcccgtgtaccctcagtctttgggctcatatgatcatctcacctctgcctgccaagtcactgggactgtaggcatgtgccattgcatcttgctaatttttaaaaaatcttttgtggagatgaggtctcactaggttgcacaggcttgtcttgaactcctggcctcaactattcttcccacctggcctgccaacgtgcttggattgcaggcatgacccaccatgcctggcctagaagggaaatttttctttgccccctcttactgctgctgtgttctttgtttttggcgttttgtttgtttgcttgtttgtttttgagatggagtctcactgtgttacccaaactagtattggttttttttttttaatttttaatttatttttattaatttatttttttgagacagagtcttgctctgtcgcccaggctggagggcagtggcacgatcctggcttactgcaacctctgcctctcaatttcaagccattctcatgcttcaggctcccaagtagctgggattacaggcgtgcaccaccaagcctggctaattttttttttgtatttttagtggaaacggggtttcaccatgttgaccaagctggtctcgaactcctggcctcaagtgatccacccaccttggcctcccaaagtgctgggattacaaacatgagccactgctcccgggcataatgttattattataattatttcaatagggttttggggaacaagtggcatttggttacgtagataagttctttagtggtggtttctgagattttggtgcacccatcacccgagcattgtacgctacattcaatatatagtcttttatccctcacccccctcccaccttttcccccaagaccccaaagtccattgtatcgcctttgcatcctcccagtttaactcccacttatgagtgagaacatacaatgtttggttttccctcaggctttgggctcatatgatcatcttgctctgcctgccaagtcactgggactgtaggcatgtgccattgcatcttgctaatttttaaaaaatgttctgtggagatgaggtctcactaggttgcccaggcttgtcttgaactcctggcctcaactattcttcccacctggcctgcctaagtgagttagttcatttagaataatggccttcaattctatccaggttgctgcaaatgccattatttcgttccattttatggctgaatagcattccatattagtatgccacattttctttatccatttgttgattgatgggcatttgagctggttctctatttttgcatttgtgaattgtgctgctataaacgtgtgtggaagtgtctcttttgtataatgacttcttttcctctgggtagatacccaggagtggttttgctggatcaaatggtagatctacttttagtcctttaaggaatctccccgctgttctccatagtggttgtactagtttccattcccaccagcagtgtaaagtggtccctttcaccacatccacaccaacatgtagtatgttttgattttttgattatggccattcttgcaggagtaagagggtattatattatagttttaatttgcatttctctgataattagtgatgtggagtctttcttcatatgtttgttggccatttctgtattttcttttgacaattgtctattcatgtccttagcaccgcccccccccccccttttttttttttttttttgagacagcgtcttgctctgtcgcccaggctggagtgcaatggcatgatctcggccccctgcaacctccacctcccgagttcaagcaattctcctgcctcagcctcctgagtagctgggattacaggtacccactgccaagcccagctaatttttgtatttttagtagagacggggtttcattatgttggccaggatggtctcaaactattcacctcaggtgatccacccgccttgggctcccaaaatgctgggattataggggtgagagactgtgcccggcccttagcccactttttgataggattgtttgtttttttcttgctgatttgtttgagttccttgtagattctggatattagtcctttgtcagatacatagtttgcaaagattttctcccatgctgtgggttgtctgtttactctgccgattatttcttttgctgtgtcataggcaaagtctttatcatgatggacaacaccctgtcatatggcttatgagaattctttgattccatcattctgaaggacatagggagggctgtgtcaaaggggtctctttttcccatggtctctgtttctgtagtgattttatctgatgctaagtttatacatcaaacctggggtctgcatagacctgcctccttgacctgtgtatggtccacacaatttcctatatgaggaagacctcatcagaagataggaaaacattggctgctcttttttttttgcatgtggggctcaaagattgcatgaaggcgtctcaacccctctttgcctcttgaggtcttgtggagatagggaaaatccagtgttttttctactctcaaatgccactcagcagagagcgcttcacttctggtcaaccgaatgggtggggatttctacgcaccaacaaccagtttttcagtggccatctaatagttttctatgatgcctttctgatattatgtatctggaattagagtcagatcccacaggcaaagggctgagttcccaaacacgtcccctacctcagcaaccaatcacaagtagcaggttgtcacctttccttcttaccaaccagctacaggttggggttccctcaagccccttcttggggttgattactttgctagggtggcccacagaactcagtaaaacactttcttaggttcactgcctcacgctgaaggatgttttgaaggatacagatgaagagccggatgaggagattcacagggggaggcacgtgggaagattcactgggtgtgccaccctccaggcacctgtgtgtcttcagcatttggaagatctcgtgaccccatagttcagggattattttttattttttattttttttagacagagtcttgctctgtcacaggctgtagtgaagtggcacaatctcagctcactgcaatctccgcctcctggttcaagtgattcttctagttcagggattttttatggaggcttcatcacataggtgtgattgatattatctcagtctccagcccctcttcccttcctggaggatagtggatagggctgacactttcatgcttgtaatcatggcctggtctttctgatgatcagcccagtccagggaacctacagaggttgcctcattagaacaaatcacattcctatcacccagaacattccaaggagttaggagctctgtgtcaggagccaacgaagagaccaatgtatgcatttcttattttacaaggttcctcagccattcttcagttgtgctttgtccatactttagtggtgtgtgtaacgggagtaggtggctcttctgagatttttactcagcagaatgggaaagacagttgacagaaggatcctttaggccggggcggtgtctcacgcctgtaatcccagcactttgggaggctagggcaggcggatcagaaagtcaggggatcgaaaccatcctggccaacatggtgaaaccccgtctctactaagaatataaaaaaaaattagctgggtgtggtggtgcatgcctgtagtcccagctactcgggaggctgaggcaggagaatcgcttcaacccgggaggtggaggttgcagtgagccaagatcgtgccactgcactctggcctggtgacagagcgggactctgtctcaaaaaaaaaaaaaaaaaaaaagaaagatcctttattggatgcccgagtcctcgtgacagaatagctcactagaatgatacatctggttataagactaaagccactgctgattttattttgggcctttccatgtattagaaatgaacttggggccaggcacagtggctcacacttgtaatcctagcactttgggaggctgaggttagtggattgattgagcccaggagtttgagaccagcctggacaacatggcaagaacttgtctctacaaaacatataaaaatttggctgtggtggtgcacacctgtagtcctagctactcaggaggctgaggtgggagaatcacctgagcccaggaggtcaaggcagcagccagccatgatggcgtcactgaactccagccttagtacagagtgataccctgtctcagaaaaaaaaataagaagaaaataaaaaataaatgaacttatttgtatttagtcaacagttccatatggtactctttgtcttctttgttttatatgtgtggggatgttgtatcagggaatggccattgatttatatatttttgaggacctttattttattttattttttgcctaggagtttatgtaacacttatatacactccaggagttttggaatgggtagtataaatatttcttttcctttcctttacctgattaagatattaaataatatttttgtcagttacgtttattagaatgtataaattgggaatttattttcatttttctttttttttttttgatagagtctcgctctgtcacccaggctggagtgcaatgccgcgatctcggctcactgcaaccttcgcttcctggattcaagcaattcttctgcatcggcctccccaagtgctaggattacaggcgtgagcctccgcgcctggcctcatttttaatttttttagagacagggtttcactctgctgcccaggctagatggcagtggtgcagttttaggtcgctgcatccttgactttgagggcagaactgctcttcccagctcaggtgatccacccgcctcagcctcccaaagttctgggattacaggcatgagtcactgtacccggctctgatatttttaataatgcttcaatgaacatgggtttctaaatatctctttaagctgctatcttagttcttttgtatatatacccagatgaggaattgttgcctatactggtaatttgattttggattatttgagaaaatgtcatacttatttttttttttattattattttcgagacagggtttcactctgtcacccaggatagagtgtggtatacaatctcagttcactgcaacctccgtctcccaggttcaagtgattcttgtacctcagcctcccaagtagctgggattacaggcgtgtgcctccatacccatctaatttttgtacttctttaatagagacaggtttttaccatgttggccaggctggtctccaactcctggtctcaggtgatctacccgcttcagcctcccaaagtgctgggattacaggcgtgagccaccgtacctggcccatacttctttgcaccattatacatttccagcaacagaacataagtctcccatttctgcacatttttgccacttgtgatgtactgttttttttgtcttttgggttttttttttaacaataaatattccatattggatgtgagatgatagctcattgtgttttttatttgcatttttccaatgattagtggtattttgcatgtttaatatggttgctagttatttgtatatcacctctggaaaaatgtgtattccattcttttccttatttcttaatttttcatttacttttattcaataataatattaaatgaaatctttttatttgtatgagttacatatattttagatattaacatcttatcggaggtttgatttgcaaatattttgttacattaagtttccttttgactctggcaattgttttctttcattcacaatcattgtcttgtagtgcgttttatgtatttttgccttctttcttgttccgttgttttagatatattcttgctcttttgcctaggctggagtgcagtggtacagttatagctcattgtatcctgcatctcctaggttcaagtgatcctcctgcctcagcctcccaagtagctgggactacaggcatgtaccaccatgcctggctaatttttaaaaattttttgtggagacagggtcttgctgtgttgcccaggctggacttgaacccctaggatcagtgatcttcccacctcagccttgcaaagtgttggaattacaagcatgagccactgctcccaaccagaatcgtctttttctttattcttcttctggttctatccattttcaaaactggaatattgaaatcaactataatattgtggagctatttctctttggagttttatcaagttccattctatacttagtttttttaaatttacttactacttttaatagagatggggtcccagtgtgttgcccaggcttatctcaaactcttaggctctagtaatcctcctgcctcagcctcccaaagggctgtgattacaggcatgagccactgcatccagcctcattctgtacttaggagctctgacacttggtgtttatatatttataattgttgtatcttcttggtgaattgagtctttcatcattttataataatctttgtctcttatggtttttgaataaaagtctattctctcatattaacactgctacctgtactttctgctggttcctgtttgcatggaaaatatttttccatcctttccatttcagcctgtgtgtgtccttagaattaaagggagtttcttgcagatgggatttagtaaatcttgttttcttctgattgcaaagttaaatcaggccaacattacatgaaaaggagaatatcaaacatagtaactattaaaaacaaaagaatacatattagattattatctgtagattttttaaatcttgtagatttttttcccctacatgtctttcttactgccttttgtagtattttgcttgtttcatcatagtaacatacttgaatcccatctcttgtgtgtgtcggatagattttctctttgtggttagcattgcagctacttcaaatactgtgaaattgaaacattctatttttaaatattaacagtgtaactttaggtacagaaaggtctacttcacaactctgctctcactttctgctattaatggcagaaattattttgatatatgttatggtcccattaacatatatcaaaaaagcttctgagaaaaagcagggattcttaaggaaaatctatacatatatagtgctttttaaatgattttgtcttttaattactaggaaagaattatgggaggctgaggcaggtggatcacctgaggtcaggagtttgagaccagcctggctgacatggcgaaaccccgtctctactaaaaatacaaaaattagccaggtggggtaacgcatgcctataatcccagctactacttgggaggctgaggtgggagaattgtttgagcttgggagggggaggttgcagtgggccaagatcacgccactgcactctagcctgggtgacagagcaagactctgtctcaaaaaacaaacaaaaaccattaaaagtcaagttacaaaagaaaagagtaataataaatatctctatatttgattatttactgacctttaatggtgaactttctattttcattgaggttaaagatactatttagagaccttttattttatattgaaggagtccctttagcatttcttgttgggtaagtctagaatactaatgcactccctcagctcttcattttctaagaacatctaaatttcttatttttgcaggtgaatgttactaaatatagtattcttggttgatatttttgctttttttaaaaaagtattttcaacatttcctctcactgccttctagcctgcaaagtttctgttgaaaaatacacataatcttatacagtttccctttatgtgacaagtcttttttgttgctgctatcaagactgtttctttgtctttgacttttgataatttctgtatagtatgtctctgaatgtccttgggttcgttttagttagcattttagtttagttagttgaccaagcttcttgaatttgtatatttatttctttccttagattggggatgtttgaacattatttctacaatggtgatttcgaatcttctgtcttcctgtgaatctccaatagtttgtatattgttccacctgatagtatctcaaaaatgtactagggttggttttcttcatcattttttctttttgctctttggagctgattcttttgaataacatatctttcaatttgctcattgttttctgttccttttgcagtctgctgttgaatcccttagtgaaatattacttcagttatcatatttaagctccagaatttctgttcttttggttttagtagtttctcctgtgattggtattctttttcttttcatgtaatgtttgcctgattttatttagttatctgtctctgttatcttttttagctcattaagcatcttaaggcagttgctttaaatacctgtcaagtaattcagagggctgcctatttttaggcttgttttgtggagattgattgattgatcataattttagccatatttccctgtccttttgtaggcctcgtaatttttggtttaggtttggtaaagcaaccacttctcccagttattttgtgtaagcgttgtgcaggatacctttactaattagcctgctataaagggtataggaacagccactccttttctggggatgtgtttttttcctggcgtgtggaagtactattactaatgactatacagctgctctaaaagttctgattttccttaagaggctcatccctgctttttctcaaaagctttcaatttctgttgtatttttctgctcataatctctctcaaactcacccataatccacctgactcctgcaggttccccactgctccagtgcatccttccgtcccttttgttttctgcactgccagcatgatacacacagtatgctgatattccttcccatgtctgagtcaggtgaggcagaatctagtctctctgtcagacactgaacatgccattgtcatgggttgaagttccacttttttctttcttttttagagagcagctctaaattgggaagcaatgccggaaacaagtctcttaaaaatcaacttggattaacctttcagttacatctgagtgaactgcagctatttcaagctgaaaggaatatttctggatgtaaacatgtcgaaaaacctatcaacaattccttagtttcaccacttcaaaaaatttattctagtgtcaaatcccacattttaaataaatacagaaatgattttgatgattctccatttctcccacaagaacaaaaagcacaaataagggaaaaaccgtgtgaatgtaatgagcatggcaaagcctttagagtgtcttcaagacttgctaacaatcaagtaatccacactgcagataacccttacaaatgtaatgaatgtgacaaggtcttcagtaacagttcaaaccttgtacaacatcaaagaattcatactggagagaagccttacaagtgtcatgaatgtggcaagctcttcaatcgaatttcactccttgcacgacatcagagaatacatactggagagaaaccttacaaatgtcatgagtgtggcaaagtcttcactcaaaattctcaccttgcaaatcatcacagaatccacactggagagaaaccttacaaatgtaatgagtgtggcaaggtcttcaacagaaatgcacaccttgcacgacatcagaaaattcatagtggagagaaaccttacaaatgtaaggaatgtggcaaagcattttcagggggttcaggccttactgctcatcttgtaattcacactggagagaaactttacaaatgtaataaatgtggcaaggtcttcaatcgaaatgcacaccttaccagacatcaaagaatccatactggagagaaaccttatgaatgtaaagaatgtggcaaggtcttcaggcacaagttttgtctaaccaatcatcatagaatgcacacgggagagcaaccttacaaatgtaatgaatgtggcaaagcatttagagactgttcaggccttactgcccatctactaattcacactggagagaaaccttacaaatgtaaagaatgtgccaaggtcttcaggcatagattatccctaagcaatcatcagagatttcatactggagagaaaccttacagatgtgatgaatgtggcaaggacttcactcgaaattcaaaccttgcaaatcatcacagaatccatactggagagaaaccttacaaatgcagtgaatgtcacaaagtctttagtcacaattcacaccttgcacgacataggcaaattcatactggagagaagtcttacaaatgcaatgaatgtggcaaggtcttcagccacaagttatacctaaaaaaacatgagagaattcatactggggagaaaccgtacagatgtcatgaatgtggtaaggacttcactcgaaattcaaacctggcaaatcatcacagaatccatactggagagaaaccgtacagatgaaatgtgtgtggtaagatctttagtaataattcacaccttgcacagcatgagataattcattcatgagagagttcttacaaactgagtatggcaaactcttcatgctaagttctagcattaatcaacatcagagattccatactaaagagaaatcatagcaatgtatgtgaatcaggtctcttgaggcctgccaaatgactagatatcaaaacatacatcttggatgaaaccatacagatggattatgtatgctgaggctattattcaaggaccattactatggaacatgataagatttacacaagcgataattcagtctctagttctccaatatttatgatactgcatgctgcagaaaagtcacagctccaaatacgttgaatctcatgacgcgatgcatgtcgaaggtccaagggcatgtggaaatggtcagttatattcaggcaattaaaaaacctaattatatggggttttttgaaaaggctactttacattttatgactttcatcctcaactctgaaatcacttcatgtgacttctttacagacctttcactgtggtctcttgaatcagtaggatgctgggcgcggtggctcccgcctgtaatctcagtacttttgggaggctgaggcgggcggatcacgaggttaggagatcaagaccatcctggctaacatggtgaaaccccatctctactaaaaatacaaaaaattagccaggcatggtggcagacgcctgtagtcccagctactcgggaggctgaggcaggacaatggtgtgaacctgggaggtggagcttgcagtgagctatcacgccactgcactccagcctgggggacagagtgagactctgtctcaaaaaaaaaaaaaaaaagaaagaaaaagaagcagtatgatgacagggatgacttcattagctgagaatcatttctatcagtttgccgaggaagaaggacactgcgttttcttattattgtctgatttagagagcatggaggtggggaggaatcatataaaatgatgatggcagtcatcatactgttgctgagcacttttttcctgacagaatggcacagtgcttctgtgctctaccaactagccatgaaatagagcatatctgtagaaatcatgcaagggagatggtgggcactaggactgcatagcaatcactgtttaggcaagaatgattaaaaagtagtcatttttggctgggcgcggtggctcacacctgtaatcccagcactttgggaggcaaggtgggtggatcacttgaggtcaggagtttgagaccagcctggtcaatatctccaaaccccatctctactaaaaatacaaaaattagctgagcgtggtggtagatgcttgtaatcccagctactcgggaggctgaggcaggagaatcgcttgaacccgggaggcagaggttgcagtgagccaagatcgcaccattgcactccagcctgggtgacaagagcaaaactctgtctcaaaaaaaaaaaaaaaaaaaatagtggtcatttttgaaatggaagagagaacagttgattagagaatttaaactaccagtatgccatgttcttgagtagcatttacatttaactgttggcataatttccaactgtttgatttagaatgtacatagttctcatgttttaattaataaaattttcctaagtatgaatgaatcacatcatttctaccaattgttttagtcccccttaggagaatatactgcacagtaatgcaacattaatagtaaatactctgcaatttggttttctttgtcttcacactgagttatgtagcagtgatatgtgtctaatcactctaactttagtgtaaaataggcatttttaaaaaatgcaccattaaggttgacgcatccagaacaattttgtgtgtgtgaaatcaacatatgcacacacttgtggtgcatatccttgggtaagtataatttacactaatcatacttaatacttgagttattctttctgtgccacttcagcctcctacaccctcaaaagtccatgaaacattcactgttcattatatttctacgtgcctattgtgtgccaaggaagactcatggcatgcaccttaatttttatgaagcaaaaatacaaatatatgacaaatacttttttttttttttgagacagtgtcttgctctgtcacccaggctggagtgcagtggcacaatctcggctcactgcaacctctgcctcccgggttcaagcaattctcctgcttcagcttccctaatagctgggactacaggcgcacgctgccacgcccagctaattttttgtattttattagagacggggtttcaccatgttgcccaggctgttctcgaactcctgaactcaggcaatctgcctgcctcggcctcccaaagtgctaggattacaggcgtgagccactgtgcctggcgacaaatactattaaatgaaagaaagtatgttaataagagtgaaaatactgtaccacaatgtcttttttttcctagtagtgcatgtcttttttttttttcctagtagtgctcagtgacgtaagtggaaaatattaatgttcataaattttctttttttttttttttttgagacagagtctggagtgcagtggcacgatctcggctcactgcaacctccacctcccaggttgaagcaattcttctgcttcagcctcccaaataactgtgactacaggcgcgcaccaccacgcccggctaatttttgtatttttagtagagacaaggtttcaccatattggctaggctggtctcaaactcctgaccttgtgatccacccgcctcggactcccaaagtgcggggattacaggtgtgagccactgcgcctggcccataaattttaagaatggtcacatagaatgggagttttttttgcttttgtagattaactagaaacttcatatacttccccttacaacatttttggcaatttgaacttttttttttttttttttttttttaggcagagtctctgtcaccaggctggagtgcagtggcgcgatcttggctcatggcaacctctgcctcccgggttcaaacggctgcctcagcctcatgagtacctgggactacaagcgtgcaccaccacgcccagctaatttttgtatttttaatagagacagggtttcaccatgttggccgggatggtcttgatctcttgacctcgtgatccacccgcctcagcctcccaaagtactgagattacaggtgtgagccaccatgcttgaccgataatttgaacttttgactgctgtactggaatttgtttgaagtccacctaaagtttgtattatatattgagaatgatgatgccatacactgatatggtctgcaaatgtttactacataaacatttacatgaggctttctggggaaagcaggatggacttccccagctggtccaaattggagaacagggataggtgagcagcctgggatgttgtattagtctgttctcatgctgctaatacagacatacacaagactaggtaatttataaagaaaaagaagtttaatggactcacagtttcacacggctagagagacctcacaatcatggcagaaggtgaaggaggagcaaacacatgtcttacgtggtggcgggcaagagagagcccgtgcagggaaactgccctttataaaaccataagatctcatgagatttattcactatcatgagaacagcatgggaaaatcccacccccatgattcagttacctccccccgggtccctcccacatgtggggatcatgggagctgcaattcaagatgagatttggtggggacacagccaaaccatatcattttgcccctggtccctcccaaatctcatgtcctcacatttcaaaaccaatcatgcctccccaacagtcccccaaagtcttatttcagcattaactcaaaagtccacagtccaaagtttcatctgagacaagcaagtctcttctgtttatgagcctgtaaaataaaaagcaagttagttatttcctaggtacaatggaggcacaggtattggataaataacgcccgttgcaaatgggagaaattggccaaaacaggtcacaggccccatgccagtctgaaatccagcagggcagtcaaagctccaaaatgatctcttttgactccgtgtctcacatccaggtcacacttatgcaagaggttggttccagtggtcttgcagggaacccatgtctgcccctgtgactttgcagggtacagctcctctcctggctgctttcacaggctggtgttgtgtctgctacttttccaggcacatggtgcaagctgtcggtgaatctaccattctggggtctataggagggtggcccttttctcacggctgcactaggcgagtagtgagtagtctgtgtgggggctccaaccccacattttacttctgcactgctctagcagaggttctccatgagggctccgcccctgcagctcacctctgctccagttccaataaagttcctcatctccatctgagaccaccttcagcctggactttttggtcagaaccattcaacaaccattttctaggaagctccaaactttcccacgtcttcctgtcttcttttgagccctccaaactgttccagcctttgcctgttacccagttcaaaatttgcttccacattttgaggtatccttatagcagcaccccactctataccattaccaatttactgtattagtctgttctcacgctgctaataaagaaatacccgagactgggtaatttatgaagacaaagaggtttaatggacacagttccatggggtcgtgtcccccgtgcttctgccacagggccatatagacagctcttatcgcggagttttcctgcctcaaatccttcagtgtcccctgcactggcccgcaccttttttaaagtcctcaccgcaaggttgattcccgccctgggagcttcccatctgctccgctccctcgtcagctcctggagcgcagcgacgcagccccagtcccagggaggccgtgaactcttcctggtcctgggatcctgcagaccctgcccctctcctgactttctcctgcctttttcctccttgatcgggggcccttctgctccccaggcctccccttctcctgatatcgagtgtggggacgtgacttctatctcaggacgttaaggtttctcttgtcccaaattccatcccacaggaaatgggctcttgaggtggggatctgactgcagtcccctccctatgaatgtgtggaggagaggaaatagaaaaatggtgaaatgggaaagaagaatgaaggagacccataaacagacggcagctgggtgcgatggctcacgcctgtaattccagcactttgggaggctgaggcgggcagatcacctgaggtcaggagttttgagaccagcctgaccaacatggagaaaccctgtctctaaaaaatacaaaattagccaggcatggtggcgaatgcctgtaatcccagctactctggagactgaggcaggagaatcgcttttacccgggaggcggaggttgcggtgagccaagatcgcaccattgcactccagcctgggcgacgagcaaaactccatctcaaaaaacaaaaaacaaaacaaaacagatggcaaagtagatggtggatgagggatttgcagagacagtgcatgaagatgctgagaaaggagcagggggagaaaagcaactagagaaatttagagaaaaactgggtttctagagagataaagttcagcaagatagggagaggggcagaaaaggggaggctcctcagatggagagttggggagagaaggagggatttggagccagggcagacagagcagcatggtgctgggagagcaagaggggcagccagtgataaggagagcacagggagaaccacagcctggggagaactgggatctggggatgccagagaggggacaggtggatatagcagggaagaggggatttaacaggggaagctagggggcagcagagacggggggaagaaagaggcagaactatatgaaaattggagacaaatattgggcagaaagaagaataagaggtgaaagaagtgagaaaggagcagaacaagtggaagagaaggaatagagggaagagcaggagaaggaagaagggcttgaaatgaggagaatcctaggggaaaaataaagagaaaaaaaaagctaggaaaagaaggtgagaatgagaggtaggtagagaaacacacagtaatgaggaaagagggggacactcaatccagatgaatgatgaattgattggatattatgattaatttctctataataaacatcacatttgtttaaaatatacagatgaagatgagaattggaaaactgtctataaggcatgtgcatttcctaattcttggtatcagaggttagcttccatttgctgtccttattctgccagacggcaggcagtgacttgactcattcaggtatgggtcactatcttcacttctgggatggggtagggtgtgtgagtgtataagataggaggaaaaaccaaagtgttttttctactcacaatcaacacaatagtgaatgctcaacacagaatgcctcatctccggtcatcaaaatgtgtggggattacttcccaccaacaagctatttttcatcagataaaaactgggtgttctctaattgaactcaatttgacaccatttatagggagttagcattagatctcacaggaggctgagggctcagttgcacaaaactgcccccagaatttgctattgctagagtgatttacacaacttggagaaacaatttactgaggtgtaccatttgttataaaggatgttacacaggacacagatcaacagccagatggaagagcattcctaataaattaatggaaacagaagtatgttttggaaaccatggactgactttctttctctttctctctttccttcctccctttctctctctctttcttttctttcactttgacggagcctcgctctgtcacccaggctagagtgcagtggtgctatctcagctcattgcaaccgccacctcccgggttcaagtgattctcctgcctcagactcccagggagctgggattacaggcgtccaccaccaaacctggctaatttttatatttttagtagagacagcatattgccacgttggccaggctggtctcgaactcctgacctcaagtgatctgcctgcctcggcatcccaaagtgctgggattacaggcctgggccactgcacccagcccagggcttgagttttaaaggtgccacagtacaccttggttctctttttttataaacaggaatctgtcttcctgacctgagtattatctctatgtgggagcaaaggagagagccctggactctggagagtgaagggaaaatagcaaaaaaatccagatgggagggaatggatcaaaggtgtgaacacaggtaagagctcagatgggcagagtggaagctgtatatatatatatattttttgagagacagggtcttgctctgttagccaggttggagtgcagtggcaatcatagctcactgcagcctggaactcctgggctcaagtcatcctccttcctctgcctcccaaactggtgggattacaggtgtgagccactgcaccctgcaaagccacactaataaatagtgtttgggaaactctgcaactgggagaattctgtggaaaaccaatagtataaatcctgttagttttttttttttttttcttttctgagacagagtctcactctgttgcccaggctggagtacagtggcgcaatctcggctcactgcaacctctgcctcccaggtttaagctagtctcctgcctcagcctcctgagtagctgggattactggtgcctgccaccatccttggctaatttctgtatttttagtagagagagggtttcaccaagttggccaggctggtctcgaactgctgtcctcatttgatctgcccgcctcagcctcccaaagggctgggattacaggtgtgagccaccatgcctggcctaaatcctgttagttttgaatggaaattttctttctttcttttttttttttctgggacagattcttgcttcgagacaatgacaaatacaaactaggtttactgtaaatatgagaaagggaaaaaatacttttattgtattagaagacttgaaatcacatgaagtgataccaatcttttgttgttgttggtcagatgttttagctattttaggtgtttgggttttttgtctttctacataactgctaaccttgttagtatctgcagaatgccttaattaggaaaggtattaaccctatgtgtcagatttgtataattcatattgctttacatggagtcttccaataaatgtatatggtatatgtctctatttgctgtctttgatttcttttatcagcatttggtagttgtaacataacagttctatgaatgttttgtttcacatgtatttctttgccccccccctttttttttttttttttttgagacggagtcttgctctgtcgcccaggctggagtgcagtggcgcgatctcagctcactgcaagctccgcctcctgagttcacgccattctcctgcctcggcctccccagtagctgggactacaggcacccgccaccacacctggctaatttttttgtattttcttagtagagatggggtttcaccgtgttagccaggatagtctcgatctcctgacctcgtagtccacctgccttggcctcccaaagtgctgggattacaggtgtaagccactgcacccggcctctttgacctttttcttaatggagcaatcatacatagtattttatttttaatatcaggtttcatgtgcaaattgctagtgtatagaaatatacaagattattattattattattttgagacagggccttactctgtcatcctggctggagtgcagtggagcaatctcagctactgcaacctgtgtcctgcaggcttaagtcatcctcccacctcagcttccccagtagctggcactgcaggcatgtgccaccatggcctgttaaatttttgtgttttgtagagatggggtttcaccatgttacccagcctggtctcaaactcctgagcttgagtgatctgcctgccttggcctcccaaagtgctgggattacaggcacgagccaccatgcctggctgatgaaatatacgatatttttgtaggttgaccttatactttgctacctttacatttttcttgttctagagatttttgtagatttttttggaattttctacataaaatcatttcatcagtttcctattgctatacacagtgattggcttaaaacaagaaaaatttattcttttataattctgtaagtcacatatctaatatgggtccatagttctgtgattcttcattaatctccaggggagaatttgtttccttaccctttgtaggttccagaggccacttacatcctttgactcatggtccacttcctccatctttaaaggtgagaaaaaaaatctctttatccctctattttcaacacatcaccactgtctctgtcccttcgcatccacctgcacccttctgatattgaaccttgtgattctatcactttgaccatataattcaggatgtctatctaaagatccttatctagaccacatttgcaaactcccttttgatatatccagtaacacaggtcatagggatgtagctaccttcctttgggaaaggtattagcctgcacaaccaacatattttctgttggtacactattttttttgtcctgtcctcaggccaccctccttcctcagcctcccaaagcactgtgattacaggcctcagacaccacacccagcctgtcacttttatttctttttcctttatttcactggctggaacctttcatattgtgtggaatagtagtgataagaggggacattcttgccctcatcccaacctctaggggaaactatgctttcaccagtttgtatgatgattctgattctgtaaggattggtaggtgatcttgagttgaggaagtttcccatgatactgctttccatactgaccgcagtatttcagattcccacaaaatgtacgaaaatagtttctccacatccttgcttgtgaagcaggttcactgcacactggttgccaatgtgtctgagttgagtgagagataatctcacggacacacagtaagttacatgaagtgaatttgttacatacagatcggcagatacctgggattcatgcattctgctccccaaggctcaggaaaaccacccagtgcagatgcagtctctctgtatgtgttcaacttgcatcacagctgtgggaggctggaaggcggcccatcctgggtttcatgctccagggatgcatggcacgttggcctaaagcaacaaaggggatcctgttctggggatctggaacacatcctgtccttttctcaccggtcccttcctctcaggatgttgcttttccagcacattctatattcattcttgggaactacaagtgagaagtcagatgcaactgggccaattcaaccccacttgaatgctgtcctgcagtctctccgccaatccagatatcccttttatttttatattttttgagacggagtctcgctctgtctcccaggctggagtgcagtggcgcaatcttggcttactgcacctccacctcccagattcaagcaattcttgtgtctcagcctctcgagtagctgggactacaggcgtgtgccaccatgcctggctaattttttttttttttttttttgtatttttagtagagacttcgtttcaccatgttaaccaggctggtctctaattcccgacctcaggtgatctgccctcctcggcctcccaaagtattgggattacaggcgtgagccaccacgcctggcccagatatcccctttaataaagctagtccatttacatgtgcactgacctccctggatctggaggtagaggctggtctcaggagattgaagtaatacctcgactggcagaatctcagggcaacatcattgaggtacagccagttgcatttcactaggctcaagaggattgctgcctcaagcaggataaccaggcctgcctggagcagtgccgtagtccaggatcccagtgacctaggtgagaagttggtactcagatcaaagaaaagttcttcaggtgaccccactgtctgcagccaatgggcctgcttgtgggccttatgtatttgtgtttcaaaaataacctgagggcttgatgtgggggtccttatctcccatgcaaggtgattcatgcctataatccgagcactttggtaggagcagatgggaagactgcttgaggctagaagctggagaccagcctgggcaacaaaaccagactacatctctattaaaaacaaagcaacaaacagtagaaaattagcacagtggagaggcacaggcctttactcacagctactcggcaggctgagacagggggtcacctgcccaggaccccaggaagtcaaggttgcagtgagctatgattgcgccactgcatttcagcctcggtggcagagaccctgtcttaaaattttaaaaagtattaaaaaactaagttggaccgggcgtggtggctactctggaggctggggcaagagaatcacttgaacccaggaggcggaggttacagtgagctgagtgcctgccactgtactcccgcctgggggacagagggagacgctgtctcaaaacaacaacaacaacaaaaaactacgtcgtttatggctatttttataagttactggctttttttttttaaagaatcggtgacttatcttcacactggccttagtcctccatgcccaacacgatgtccctaggaaagtctctggaattgagcacagggttgaccttcaccgtctagagtgaatggggaagataaatgaaaagtatttatcttctatgggcactggcatgaaatagaacattctaccctggcagggttttgcatttcacattttagcttgcatcatccccttcacagacaattccaaagtgtgttaattcaattcctaaagcttcccttcccttcctcccttcccttccctccttacttttctttcttgtccatttattttcggtttttttctctttctttcttggttttctttctctttttcaacttctctttcttttctctttctctttactctctctcttctctctctttctgcttccagggtaggtgggacttgaaattcattttaatagaaggaattttcgtggatataatctacaaccgattttgctctgcgcaggtaagatccgttttcagaccaaaaccctgaaaacaagcgcagccagtcaagcgaacggaagcgcaggcccggcccaggctttgtcccggcccgccctggtcccagccagtccggcctctaggatgcgcgcgcaatttcgtgcaaacccggaagcggaccgcggggggcgaacgcctagagcgcagtttccggtagacccggaagccgattgcagggagaaactgttttcgcagcagtgcgtgagtttccctttgtctatgttaagtctaggctagccagttcttctctgcttctatacccgggagctgaggggcatgcagaccttgaaatcccggcaccgctccctccaccccgagtaaattcagacatcctttgagagtctgggagtcgctttctgcgtgttaaaatcgcttggaggctggtcgtgtgcccggtctttttgtcatttacccacgtagacacctcctatcgtggggtttacctgcttcaaatcctttagtaacccctacacacgccccgcaccacgtaaaatcctcactctccgttcccctagcctcgcccttctttgcccctagagctcagcgccccaacagggcacgagaggcctcgtcctctgcccagacctggtttctgcagactccacccctctcctgacccactcctgcctttttgctccttaatctggaccctctgttccccaggcctcccttttccagccaccggttctcctgaccccgagtgtggggggtgacttcagtctcctgacatccagtgttctctcgagccagtttccagcccacagaaaatgagctcttccggaagtgggcatcttattccaatcccctccctgtgaatgtgtggagaaaaagagatgggaacgaggcagaggaaatagagaaattttgaaagagaaatgaagaatgagagacccattaacagaaggcaaagtagaaggtgagtgaggggtttgcagaggcacagtgaaagaaggtgccgagaaaatagcaggggagaaaagtaactgtaaaaatatagacaaacctgggtctgtagaaagacgaaattcaacaagatagggaaggcttctcagacagaggggggagaggaggagggatttggagccaggtcagacagagcagcgtggtgctgggacagccagagggggcagctggtcacaaggagaacagggagaaccacagcagggggaggcctgggatctaagggtgccagagagtggggacaggggtgtgtaatatcgaagatggaatttaacagggagaccccaaggggagctgagatgtgggaggaaagaggcagaaatatatggagattagggacaatgaaagattgggcagaaagaggaataagaggtgaaacaagttgtaaaaatggatcagaacaggtgggagagaaggaatagagggaagaatgggacaaagagaagaggagggactcaaaatgaacagaatcctaggggaaaatagagaaaaaaagagctaggaaaaaagatgagaatgagagatatgtacagaatgaggcagggaaacagtagtgaggaaagagggggaccctggttacagatgagtggtgagttgattggaaattatgattgaattgtgacatattaatttttctataatataaaatttgtttagaacacatgaggctaggagctgtggctcacacgtgtaatcccagtactttgggaagctgaggtgagcggatcacttgaggtcaggagttgagaccagcctggccaacatgtgaaacccatctctagtaaaaatacaaaaattagctgggcctgatggcctgcgcctgtaatcccagctactctggaggctgaggcaggagaatcgcttaatcctgggaggcagaggttgcagtgagccgagatcgtgtcactgcactccaggttaggtgacagagcaagactccatctcaaaaaacaaaaaacaaaaaaccacacatgaagatgagaattggaacactatttataaggcactcttctcttttcttgggatggactagggtgtgagtgtataagttaggaaaaaccagtgtgtttttgtgttcacagtgaacacaataaagagcgctcaacacagaatgcctcatctctggtcaccaaagtaatatgggaattacttgtcaccaacaagcagttcttcgtcagacagcacctgggtgttctgtaattttactcagtttaactggtcagtgtaggaacaaccacagacacattttgatcactaaaggtgagggattctcctttgggtgtgagagtagtaaaaacagtgtggttttttcctgtctcaaacagtaaggggaagaattttccaacaggcccactcacctgtctctaggactgtgttcttagtagtgactgggaattgtctgtccctgctcctggctgctgctgatgctgagactgtgtgccacaggccagccccattcactctctcctgatgccacggcatccctcctccacagtgtcatcagattttacttcaagggaattattttggtcagcatacccagatggagttgttgcccattaaaacacacacacacacacacacacacacacacacacacacgcctttattttttccactatttcatcctcagaagaaaaaacaaagtattagctacatttttacttgcaataagtatgccttttctgtgctccatgtaagagcacaatataccaaaatcttgtttaggcgctctctcactctttcctccatttcttgcttgaccccatccaatcaggttttgacaccaaccattccactgctcctttttttatctgagtcaccagtgacttctctgtttctaaatctagttatttatttattcatttaatttttagagacaaggtcttgctctgtcacccaagctggcatgcagtggcacagtcatagttcaccataacctcaaacccctagactccagcaatcctcccgtcttagcctccagagtagataggactatgggcctgtccctctgcgtggctgattgaaaaaaaaatttttttttttgagacaaagtctcactacattgcccaggctggtcttgaactcctgacttctagccatcctcctacaaagaagtcccagcatgctgggattagaggcatgagccctttaccctgcttaaatctgactttgaattttctgtcctcctgtctttttctgtcagcagcatgtttcacagctgatcactcttttttttcgcagctttgaagacattgcttgtatttttaaaaatctgtttaaaatttttctcattactttcgtatcttatcagtttcctctgctgctgtctcctgaagtgtcttctctgaatatggaaatgtcacccaatttagtccttaaacctgttctgtctgcccacaccctcagcttttccttttgatctcatctatggttttaaacaccaccaacatgtctccattttccctcttcacccacccctctcccctgaattccaaaatcctgtgtccagtcatgttctcgacatctctgctgggacatccacaggcatctccacctccacgtgtccaaaataggcttcctgaactcccccagacatgttctccctacagtcctgcatagctcagatgacagacaccttctactttctggggattaactaaacctgtcagaatgtgcttaaaatatatgagatactatttgtgttttaatttctaaggtacagaataagtgacatatttacttaaaatgagtgaggaaatagattgtttcaaaatttcttttgatgtgtaggagaaaatatttgaagagctcagccctgcctgatctgcttccccaggacctctctgacctcatctcctgcctctgttcttcccgctccctctactgcaactacacagccccctttccttttctgagagcgttttgtatttttaaaataagtgcttgatcaaagtatgattttaggaatcacagtttattaccacatgaagaattgcttttttttttttttttttttaggttcacaaattttaagaaagggagaataaagtgaaaaaaatctcagaaggaatccactcaacagacgaggtaccttaaccacataatggttgatttccaaaattattaacatctgcttgctcagttaggataaatcagacctatgtagaaagtcaaagtttgaggattacctcagggtgaggtcttccctttgtgtgtggctatggcacaggaaggaggtatgttgattctaagccctaagcagcatatttttgacattcaggattcacttccaaagagacatattatgcaaggaagcaacttggaagaggaaagaaaagaagtcaggaatggcccttactcaggtaaggtaatgttctcagtggattgttctgtctctgtttcttcctgaaatgccaggcattggagttgctaatctttgactctgaagcatcctgcctgacacgtttgcttgcacttacccatggcttcttccagtcccttcatttccgcttgagatttcagttcactgtgacccattgacatgaacttgggaagaggctgcactgggcatggtccgggggagggctctcagcagacatggatggagacggggtgtgggtcccgtggtggcagtgctgctgggcagcagggattgttcagggatcacatctggatgcactgtcagtgttctgtggactagaattagagaagctgcacgtcaaagttcctttctttcttctttcttttttttttttgagacagagtctcacacgttgcccaggctggagtgcagtggcatgatccctgctcattgcaacctccgcctccctgattcaaaggatttttccacctcagcttctcatgtagctgagattacaggtatgcaccaccactctaatctaatttttgtgtttctagtagagatggggtttcgccatgttggccaggttgatcttgaatgtcagcctcaagtgatctggccacctcggcctcccaaagtgctgggattacaggcgtgagccaccacccccagccatatccaatgatttcttaaggtatagggtgctgaggtattttctttgcccttaatatgttaaattagtacattaatttcctgtaacatatcacctttttattaatggaataaattagtaaacttaattaaattttgttaatacctaaataacaatattttaatggacgaagcttcatttataggccagaagcagtgatgtgtgcctataattctagcttcttgaggggttgaggtgggaggatccattcagcccaggagtttgagactatcctggacacctagtgagatcctgtctaaaattttaaaaatattatgtttttgaatatggatatttagtagagattggagttcaggtttctgtggttttacatggtctcccatttttaagtacttaccatatgtttataaaataagttggtacaatttatacatttttattgtggcaaatatgctgaaatacacattgggaaaaatagtacttacaggtaggcacaatggtgcatgcctttagtttcccacttgggaggctaatgaggaaggatcctttgatgccaggagttcaaggttatggtgtgctgtgaatagccactgccatccagtttggacaatgtattgagaccctgtgtctaaaaattgcgaaccaaactaatgatgaaaaatatgtaaaaaataggtcactgggacagggtgcagtggctcacccctgtaatcccagcactttgggccaaggcgggcagatgagagggtcaggagtttgaaaccagcatgaccaacatagtgaaacccatctctactaaaagtagaaaaattagccaggcatggtggcgcacatctgtagacccagctacttgggcggctgaggtaggagaatcgcttcagcctcagaggtggagattgtggtgagccaagattgtgctactgcactccagcctgggcaacagagcgagactccatctcaaaaaaaaaaaaaaaaaaaaaagtcagtgagagacaacttctcttatttcaactgatgtctataagtgtgtatgtgtactagtgtatatgagtgtgtaagtgtgtacatgtgatgtgtgtggatgagtgcacaacagtggtttttatgaatggcatgtcatctatataaattttatgttttttagtcagttgaaattacatcttaaatatttaccaggttaaaatttttctatactatcatgctaatgagctgatagctataagaataataatgtattatggggacatataatatattatatatatgcagatataatgaccttttaggcagttttgtgtttttaatccttgaacttgttttaagtttactgaattaggtaattgtcaattttcttttgatcctgatctgttacttaactgtttgattctttaggtttgattctaatgtccagacacctgggatcccatgcttacactgccattgttagtcctgacacctggggcgagtttcctagaatacatgtgaaagagttgtctcttcagtaagataggaacagattattctttcttcttttgtttgtttttttaggtgaagtctcgctctctcacccattctggagtgcagtggcgagatcttggctcgctgcaacctccgcctcccgggttcctgcgattctcctgcctcagcctcccaagtagctgggattacaagcgcctgccaccacacccagctaatttctgtatttttactagtgatggggtttcaccatgttggccaggatgctctcagtctcttgaccttgtgatcgcctgccttgtgatcctccagttagttcatgtaaagcatttaaaatagtgcctatcacatgggaagtgttccattcagccattgctattgttatcatcacagttttcagattttgatcattttttattttatttgtttttttgagtcggagtgtcactcttgtctgttgcccaggctggagtgcagtggcatgatctcagctcactgtagactccacctcccgggttcaagagattctcctgtctcagccttcttagtagctgggattacaggcactcaccaccacacctggctaatttttttctatttttagtagagacagggttttaccatgttggccaggctggtctcgaactccttacctcaggtgatccacctgccttggcctcccaaattgctaggattacaagcatgagccaccacacctggccaagattttgaccattcttaaaaactacaataggttggggccgggcacagtggcttacgcctgtaatcccagcactttaggaggccaaggcaggtggatcaggaggtcaagagatcgagaccatcctggccaacatggtgaaaccccgtctctactaaaaatacaaaaaattagctggtcgtggtggcaggcacctgtaatcccagctagttgggaagctgaggctggagaatcacttgaacctgggaggtggaggttgcagtgagccaatatcacaccattgcactccagcctgggcaaaaagagcgaaacaccatctcaaaaaaaaaaaaaaaacccaaaactacagtaggttgggtgtggcggctcacacctgtaatcccaggactttgggaggccaaggtgggaggatagcttgagtttaggagctcaagaccagcctgagcaacatggtgagacaccatatttataaaaaatacaaaaattagccaggcatggtgtcatgagcctgtagccccagctactccagaggctgaggttggaggatgacttgagtttaggaggcagaggttgcagtgagtcaagattgtggcactgcactccagtctgggtgacagagtgataccctgtctcaaaaaaaagaaaaaaacactgtagacattgtcatctctgaagacaccacttgaattgaatctcaggtagatactggatatcacttggtgtgtaaaaatacctaacacttctatagagagagataaccctggattaattttttttgtattgtccaaaaatgagacatctacactgatttaaggaatgtcttaacttcttatggagaaatataataaaaccacaattacagacacgtaactggctcaagaataccttaatatggatttttcacagtgctcacataagtggagtcagtccttaacgactgtcttcccattctttgtgacgatgagtactgtgtgcataccttgttgctgaaatgtggattttctttcagggacccttgaaattcatggatgtggccatagagttctctcaggaagagtggaaatgcctggaccctgcgcagaggactttatacagggacgtgatgttggagaattataggaacctggtctccctgggtgaggataatgtcccctcagaagccgggatctgccctggtggatctctgaattgtgtcttatatgcctcttgggagctcctgcattgcttgcctgagattgaaaccatgttgactcagaattgaaaaactgtattacactttctggacttgaaatgtcccctttcttcagttattctcctccctccacaattcatgattggtggcaccagggccgaagtatgcaggaaaccttatgacaaactttaaaaatatccagttccctgttttctacccctgtgcttttgattctatagttcttggaagggggctctatgtctgcatgttacaatgttccctaagcattcagaaagaggcagtcagtagatgaatttgtgaaatactatttatgatttaattataatatcctctctcctccctaaatacagggcttggacttgggagatgccacagcacacatttattctttcttttataaataggaatctgtcttcctgacctgagtgttacctccatgttagagcaaaagagagatccctggactctgcagagtgaagagaaaatagcaaacgatccagacggcagggagtgcatcaaaggtgtgaacacaggtgagagctcgggtgggcagagtggaggccccataatttttgttttttgagacagggtctaacgctgtcatccaggctagagtgcggtggcaatcatagctcactgcagccttgaattcctggacttaagggatctccctggctcgctcttccaaagtgttgggattacagccatgagccactgtaccctgcaaagccacactattacatagcgtttgggaaactctctgcaaatgggagaattctgtgggaaaaccaaagttgaaatcttgtgagttctgaacagacatttttctttattttcctatttattttttggagataggatctctcttgggtcacccagtccagaatgcaatggcatgattatggcttgctgcatcctcgacttcctgggctcaagtggtcctcccacctcagcctcctgaatagccgggactacaggtgtacgccacgatgcctggctaatttttggtattttatgtggagatggggtttcaccatgttacacaggctagtgttgaactcctgggcacccagtccagaatgcagtggcatgattacggcttgctgcatcctcgacttcctgggctcaagtgattctcccacctcagcctcctgaatagctgggactgcaggtgtacgccaccatgcctggctaattttttgtattttttgtggagttggggtttcaccatgttatacaggctagtgttgaactcctgggctcaagtagtctgcctgcctcagcttcccaaagtgttgggattataggcataagccacagcaaccagtaaggtgtgttgtttaattggcaaatatttgtggatctttaagtttttattcttttggctgggcacggtggctcatccctgtaatcccagcactttgtggggctgaggcaggcagatcacttgaggccaggagtccgagaccagcctggccaacatggtgaaaccctgcctctactaaaaatacaaaaatcaactgggtgtagtggcaggtgcctataatcccagctactcaggaggctgaggcaggagaatcgcttgaacctaggaggtggaggttgcagtgagccgagattgcaccactgcgccctagcttgggtgacagagtgagaccctgtctcaaaaaaaataaaaatgcatttttttcttttgttaatttcaacgttacatgcctctgcctctggagtagctgggattacagacatgcaccaccacgcctggctaatttttgtatttttagtagagatgggatttttccatgttgggcaggctggtctcgaactcctggcctcatgtgattagcccttccttagcctgccaaagtgcttgggattacaggtgtgagccacttcacctggcccaaaacattctattttaaatgttaacagcttatctttgattaggtacacaaagctctgcttaacaactctgctctttctgttattactggcagaaattaatcctatatattttatgttcccattaacatatgtttataatgtttataatgctttttaaatgagagtgtctttttttttttttctgagatggagtctccttctatctcccaggctgatctcggctcactacagcctctgcctctctggtccaagtgattctcctgcctcagcctcctgagtagctgggattacaggcgcccatccccacccctggctaatttttgtatttttagtagaaacaggtttttgccatatttgccaggctgctctccaactcctgacctcaagtgatccacctgcctcggcctcccaaagtgctgggattacaggtgtgccactgtacctggcctgattgtgtcttttaaattgtaggaaagaattaaaagtcaagttacaaatgaaaagtgcaataatacttgtttctgtatttgatcatttgttgaccttttatgatgagctttttatttttatttttgggggatggagttttgctctgttgcccaggctggagtgcaatggcaggatcttggcttactgcaacctctgcctcctgggttcaagcgattctcctgcctcagcctcccgagtagctggggttacagacaccacgcccaactagtttttgtatttttaggagaaacggggtttcaccatgttggctaggctggtcccgaactcctgacctcaggtgatccacccacctcagcctcccaagttgttgggattacaggcatgagccactgcgccctgcctatgatgacctttatattttcatatggattaaagataccgtccagagtgctttcatttcatcttgaatgctcgttttagcatttcttcttggacaggtctagaatactaattaacttcctcagctcttctttaggaaagtctaaaattcgcctttatttttgcaggtgagttttgctaagtgtagtattcttcattgctgttttgcctatttttctttaagcactttcaatatatcacctcactgctttctagcctgaagatgtctgctggaaaatatatataatcttacagagtttagtattgtctgacaagtctcttttttgttgctgctgtcaagattttgtctttgtctttttttgactcttgataatttctttatagtatgtctctgtgtgaatgtatttgggttaattttaattagaatgatcaaatctcttttttttttttttgagacggagtttcactcttgttgcccaggctggagtgcagtgccatgcatgatattggctcactgcagcctccacctcccgggtttaagcgattctcctgcatcagcctcccaggtagctgagattacaggcaccctccatgatactccttttcatgcatcattttcctgatttcatttaattgtctatctcatttatgtttcagctggttaagcatcttaagacagttgctttcaaaatttgtaaagtaatcagagggctgcctttttctaggttgggtttgtggagatttgggtttttttgtttgtttgtttatttcaatgtccttatgtaggccttgtaatttttattttaggtttgctaaaacaacttctcccaggtttttttgcttgtttgtttttgtttttgttttttttgagatggagtctttctctgttacccaggggctggagtgcagtggcatgatcttgtctcacttcaacctccacatccaagattcaagcaattctcttgtcttagcctcctgagtagctgggactaggcgcacaccatcacgcctggctaatttttgtatttttagtagagacagggtttcaccatgttggtcaggctggtctcgaactcctgacctcaggtgatccgctcaccttggcctcccaaaatgctgggattataggcatgagccaccatgcccagccaggtctctaactattgacctcaagttatccatccccccttggtttcccaaagtgctgggattacaggcatgagccactgcactggctgttccagttcttttacataagaactgtacaaggtgagacctttacaaatcaacctgttgtaaagggtgtgggtgccacctgcatggaccttgggggactaaacaaagggaacaaatgtgggaataaaagacaaagacaatagagtatatttggaagaaagggtcagggggctccttgcttctaatggacaagggccctgagctttagagcccttcacattttattgggtaaaagagggagaagggtgggggtgattgtcggtcagcggcttgatttacagcaggcttgcaagactgcattctttgaacaataggctctagatgtcccagtagataatctcagtgagcacagtgccagggaatgattgcctccagcaaaccttctggcggtaggcgcagtcatgagtttgcccacatcctgcattcatgataaacagtttgctgtttggtcatatagcctccagtggaacgctgagttggtcatgtctctcaggccatcggctccctacatctcccctttgtgtttatgtattactgttacagatttgtctaagcattggcctacctaaaagttctgttggagatagggggtagagagaataaacaaaaacaaaggtttttgtggctgtagccgggaggcatgtctctgctgaagcatttgctctataagctataattcctcttcagcctgttaaggggcacagggaatttaaggaagaatctccttgcagggtttggtaaagatgtgtaagttgataggtggcaatacctagcatagggcgtagccaattaatatctcctagtatttgttgaaaatcatttaaagtctataatgtgtctttaccaagaactgctttctatggccgtacactcctctccgtaacaatatttcctacgtaatggtatggggaagttatttgcactttctctggagcaattttgggattccgtttaacaagatcttgctttacatctctgagtaattgatgtaaatttgatctgtaggagtggccagaagaatatcatccataaaatgaatgatatacgcagtgggaaacatattttgagactcctttaatgctcttcctacaaaatggtgacataatgtaggactgttaagcatgccttcaagtaaaacttgccattgatagcaagaaacaggttctctatgattaatagaaggcatagagaaggcaaattgaggcttatgcttctcgtgtaatggtataataaagaaacaatccttaaaatctattactacaagaggccagtctcttggaatggccgccggggaaggtaaaccttgctgtaatgcacccattggtttaatttgtgcattaatagctctcaaatcatgcagcagtcaccgtcttccaggcttttttggaataacaaataccagtgaatttcaggggctaactcacttctctatatgtcctgcattcaattgttcttttaccaacagatgaagttgatctagcttcccctgtgttaggggcccacacaagtttctcactaagccattctaatggtaaggcagtgggcagaggagaaatatgaatgacccccatcagaaatcctgacgtcctagcccttttctgtttttccagttactgagaacgggttagggtttccttgtaggaatttccctaaaccttttctactttcatatcccatgtccttcaacatttcaaatcctgggttaccaaagttttcatttgtaagtctcatatttcatgctgtaagtctccaccccataaattgatggctgtatttacaacataagactggaaagtacctgactgaccatccagaccaagacaaggtaaaatctcagcactctgttgaacacttttagctgctcctactcccactaggggtgtggaggttagtctgagagtcgatgctgggggccagtctttactggatatgactgacacatcagctcctgtgtccattcgcccataaaatttctttcctttaattagtactacacaggtaggtctattagaggctatggattgggatagataagtttcctatgtagttgtgctcccaaaccctttatttcctcatttctccttttatgaagatgggtgtaatttgcagggaataagcaatagctaagcagtatattctcctggttcaaaaacccaaagatcttgtgacattaaaactacttgaatttctccttcataatcggagtcagtcactcctgggactacagtgatgccttgcaagttaaggcggcctttgcctaaaattagttccatgtatcctcttggtaaaggtcctcaaatgccagtgggaattttgataggtttgtctccaccaactactgttatttctcttgactgggagatctaatcctgcacttcctggtgttcctggggtgagggaatcaatgtttctcttgggacccatccctgaaatgggcttgtggtctggactgagaatgccctgattgtttgaggggcccgggtccaggccaccttctcatttcccagcaggaggggtgccattctgatgaagtcttgagtggcactgatgagcccagtgatttcctttgttacagcgaggacagagtgctggcgtttttctgctgggtgttgggggggggcactgcattgtgaagtcctttctgtcctgagatctggtggcattcctttttaaaatgtctggttttaccgcaagtacaacattttcccaatttagcgtttgacccttggctccttttagatttgtcaactactaaattagccatgcttcagctatcattgaagagcaatgaagctcagttccttcatcctaacaagctctgagaaaatttcccaagtcttttgtacaccttacaggtgccagtgcacatttacaatccacgtttgcattctcaaaagctaaagttaaggttagcatttctgtggcagtggcatgaggaatctgacgcttcactgcctcttgtaatctcgcaagaaattgtgcatagggctcctacaacccttgcatgatatgcaaaaaggattgtactaggactccctcatctggaattgtggcccaggcgcatttagcagcctgtgaacgctgctgataagcagcagctgggggtgccatttgatgttccaggtctgaataagggtcattactcaatagcatatcctctgtaatgtctccttgacaagcagcacgattctgtctagcctggtttgcacacagttcttgccaatttaaattccgtgtcagatacgcagtagcagacaagtttgcgccaaaagttttacatcaaagagtagaaggcacgtagcaccgaatacagattctagcaatcctaaagtgaatgggctctgtactccatcgttaactacactcgtttgtaattccttcaacaactaaactctagggtattttcatgaataaactgatgtagattgtttcgatcaggccttatggaaataggaaaagcacaaggtcctaagggctctccagctatggcagcagagtgtaacattctttgtactggggtctctatttctgctactgaaggaggtggtacagatgttgctgcaactggagggggtggtaaaaaccaatttttatcctccctctcctgttttttgttttcaattggatctgtgggtgggacaacagattctttcagatttttagactcagcctgctgcccagcagaataatgagataatggcagaacagtacgaaccagactccacgtgaagatagaagaatcaactttaagacctttttgatgagcctcttttaatccttttcctgctgtgtcccaattttccacatcaagagtgcctgcctgtggaaaccatgggccatgcatcataatctcctgcagaagcttaatgtctgtgaattaacctgagttccaggctgtctcaatagaacttgaaacaactgcacgtagtgtttttttcaacagacaagttctgccccacgttaccctgattcagaaaacttcccgttcgcagtactttagagcaccgacctcatatcgctcccagtacctcttcagggcactgaccttatatccgctgccagccgactcatccaggtttccccattcaccttgtgaatttcagttcctctactccagcagaaccttctttgttcacgtcctcaaagtcctatgttcggaggccacttgtccgacatcctcggagtccctcttctgggtcaccagttgccacctgcacagaccttgggggactgaacgaagggggcgaacattggaataaaagacaaaggtgtatatttggaagaaggggtcagggggctccttctagtgaacaagggccctgagctttagagccctttgtattttattgggtaaaggagatggtggcagggggagggggtggttattggtcagcggcttgatttacaacaggtttgcaagactgcattctttgaacaatagactgtagatgtcccagtagataatttcaatgagcatggcaccagggagtgattaccttcagcaaaccttctggtgtcaggcgcagtcgtgagtttgcccacatcctgcattcatgatagtttgttgtttgatcataaagcctccagtggaatgttgagctggtcacatctcttgggccttcagcttcctacatgtgggaacactcagtccttttctggggatgtgtttcttctggcttgtggaagtaccattattaatgtctatacagctcttcttggatttctgattttccctaagaggctcatccctgcttcttcccagaagttttcagtctctgttgtatttctctgctcatagtctgtttcagatttacccataattctctcgactcctgcagattccccactgctccaatgcatcacctcagttccttgtgttttctgcactgccagcatgatacacacaataccctgatactcctaccaatgtctgagtcaggtgaggcagaatctagaccctctgtcagacactaaagatgccattatcatgggttgaagttccacttttttctttctgttttagagaggagctctaaattgggaagtaatgcaggaaacaagccttgtaaaaatcaacttggattcacttttcagttacatctgagtgatctacagctatttcaagctgaaaggaaaatttctgggtgtaagcattttgaaaaacccgtcagtgacaattcctcagtttcaccgcttgaaaaaatttcttccagtgtcaaatcccaccttttaaataaatatagaaataattttgatcatgctccattacttccacaagaacagaaagcacacattagggaaaaagcttataaatgtaatgagcacggccaagtctttagagcatctgcaagccttactaaccaagtaatccataacgcagataatccttacaaatgcagtgaatgtggcaaggtctttagttgcagttcaaagcttgtgatacatcgaagaatgcatactggagagaagccttacaaatgtcatgaatgtggcaagctcttcagtagcaattcaaacctttcacaacatcaaagaattcatactggagagaagccttacaaatgtcatgaatgtgacaaggtctttcgaagcagttcaaagcttgcacaacatcaaagaattcatactggagagaagccttacaaatgtcatgaatgtgacaaggtcttcaatcaaattgcacaccttgtacgacatcaaaaaattcatactggagagaaaccttacagttgtaataaatgtggcaaggtctttagtcgccattcatatctagcagaacatcaaacggttcatactggtgagaaaccttacaaatgtgaagaatgtggcaaagcattttcagtgcgttccagcctcataacccatcagttaattcacactggaaggaaaccttacaaatgtaaagaatgtgacaaggtctttgggcgcaagtgtttcctgacctctcatcagagaattcatactagagagagaccttatggatgcagtcagtgtggcaagatctttagtcagaaatcagaccttatacgacatcgaaaaactcatactgatgagaagccttacaaatgtaataaatgtggcacagcgtttagagagttttcagaccttactgcccattttctaatccatagtggagagaaaccttatgaatgtaaagaatgtggcaaagtcttcaggtacaagtcttctctaaccagtcatcatagaattcatactggagagaagccttacaaatgtaacagatgtggcaaggtcttcagtcgcagttcaaacctggtatgccatcagaaaattcatacaggagaaaagccttacaaatgtaatcaatgtggcaaggtctttaatcaagcatcataccttacaagacatcaaataattcatactggagagaggccttacagatgtagtaaatgtggcaaagcatttcgagggtgttcaggccttactgcccatcttgcaatccatactgaaaagaaatctcatgagtgtaaagaatgtggcaagatcttcactcagaagtcttccctcaccaatcaccatagaattcacattggagagaaaccttacaaatgcaccctgtgcagtaaggtcttcagtcacaattctgaccttgcacagcatcagagagttcattcatgagagtccctacaaactgtatggcaaaaccatcatcatgagttctagcattaatcaacatcagtgagtccatactaagtggaaatcatataaatgaaatgtatgtgacacaggctttatcaaggcctgccaaatcactggacatcaccacatcactgtggaggatgaaagcacacagatgaattgtgtgtacttgggctattattcaaggaccattgctatagaacacgataggatttacacaagaagtaactctgtctctggttctctgatactaatctatgatattgcatgatgcagaataatgctaagtcaaaatatgttgaatctcatgacctgatgtatatcaaaggtgcaacggcttgtaaatgaccagttttattcaggctataaagcattcaattatttggggcttatagaaaaggctactttactctttgtgacttcgaaatcttttcatgtgccttccatacaggccattcactgtggtccctgggaaagaatcagtaggatgacagggctgacttcattagctgaggattatttctatccaatttcctgatgaaggacattgccttttgagattaaatattgtctgatttagagagcatggaggtgggcagagtaacataaaactgatgaccgtcatcatactgttgcagttagcacactttctcctgacataagtgcacagagcttcagtgtccaccaactgaccatgaaatagagtatgctgtaatcttaaggcataggttattagtgggaagagagtaataggttgctagtgtctgattatatggtagaaataatgcaaggaaaaaggtagccaccttctccattgaacagcagtacctgctgtttagcaaagactgatgagaagtagacttttttttttttggagatagagtctcactctgttgcccaggctggagtgtagtggtgtgttcttggctcactgcaccctccgcctcctgggctcaagcagtccttctgccttagcctcctaagtagctgagactacagacgtgcgccaccacacccagttcatttttgtatttttagtagagacagtgtttaccatgttggccaggcaggtctccaactcctgacctcaagtgatatgttcacctcagcctcccaaagtgctgggattacaggcatgaaccatggtgcccagcctcatttttgaaatggaatagagaacagttatatcacagttgagagtttaatcaaaatgaccggatcagcatattctttttttagatgagacagagtttcgcccttgtcacccaggctgtagtgcggtggcgcgatctcggctcactgcaacctccgcctcccgggttcaagcaattctcctgcctcagcctcccaagtagctgggattacaggcgtgtaccaccatacccagctaatttttgtatttttagtagagatggggtttcaccacgttggccacactggtctcaaactcctgacctcaggcgatccatctgcctcagcctgaaagtgctaggattacaggcgtgagccaccacacctggccagctcagcatattcttaagtaggattcacatttaattcttggtattataagttgcaaccatttgatttagaatgtatgcagctctcatgtttgtagtaataaagtttcatttttcctaagtatgaatgaatcgtgttttctaccgtcataatttcatcccacctcaggaggatggatactctgtagcacacagtaatgcaccattgggattttaagattggagcatccagagcaagttttctggttgtgaaatgaaacatgtcctttggttacatatccttaggtaagtgtgaatatgagtaatcatacttagtacttgaattattgtatctgtgctctgccctagaatgcttctgtgggtacagtgaaagtcccaaagcagtgcaactccagcatcctataccctcaaatgtgtttatagcccttggcaaatgtttagtgtatcattatatttctatgtgcctttttcttgtgtgctaaattagacccatggcacacattctctctttttttttttttttttttttttttgagagtcttgctctgtcacccaggctggagtgcaatggcgcgatcttgactcactgcaacctccacctcctgggttcgagcaattcttctgcctcagcctcccgagtagctgagattacaggcatctgccaccagtcctggctaatttttttgtatttttagtagagacagggtttcaccatgttggccaggctggtctcaaacacccaacctcaggcgatccacccaccttggcctcccaaagtgctgggattataggcttgagccactgtgcctggcccacactttcatttttatgaagcaaaaatacaaatatgacaaatattatgagataaaagtgtgaggataaggttaaaaatagtgtaacacaatctctttttttgtccttgtgctcagtgacataatttgaaattactaatgttcataaatttcctcgtaagggtggacacacagaatggaattgtgttttgctttggtattttaacaaggaacttcacatatttacccccacaacctttgtggtaatttgaacttttgcctactccactagaaccttacaaaaaaagtttttttttttttaaatttgagacagggtctttgttgcacaggctggagtgcagtggcacagttagggctcactgcagcctcaacctccccggctcaagtgatcctcccactttagcctcatgaatagctgtgactacaggcgcacaccaccacacccagctaattttggggtgttttttggtcacagtgttgcccagctggtctccaactcttgggctcaaatgacccacccacctcagcttcccaaagtgctaggattacaggcatgagccatgtacctggcctccactagaacttgtttgacgtccacctaagatttggcttgggtattgagactgatgatgctatgtactgaaggggtctgagaatgtttattacataataagactttctgaggaaagcaggttagacttccccagttggtccaaaaatgtcatgagaaaactgggatagatgactactttgggtgttatgattgttgaagcgtcgggctggggtgtgggtacttacttgtggtttgaactaatacctggtgccaaatgagggagcactcaggctttattatcagttgaccagatgggcatcataatgtagtctcagcaatgcaccaagatgtaacagtctctcatttgagataacactttgggttctttgtcctacctccaagaaaaggagtgtggacataaaagtgagtttggagcgaaagtttaataagcaagaggagaaagctgtctgccagcagagaggggctcctgaacaggagtactcactatgaggtccgtattggggtttttatggactggaaaggggaaggaatgtgcttagtctgcgggctgtcttggagaatgcatgcctcagcttggcccgggacctattagaagctgaagtgaaagcttggcccaggaccaattaggggctgaagtgatgattcatagaagccagacttacagtccaataaaggaacctgaacttattggagcacctgaacttattggagcccactgtgcccatgtccacaaagggagaagaaacttttgcctgggagcccactgactctacaaaggcaaaaggcatttctgtgccaggcctgctcccttatctgagtgagatggaggtctgtgcaagtttttatccaaatgggccttttccatctgtgcagccgtaggcataacaccttgtgctagttcccttatcggtccctgcaccttgaattttttcccaggctgctttttctgttaggtggggatgaggcactgacccatgggccagggactctccagagacccttttcttgctatctacctaaggcaagttaactacctcctttcataggaagaaggaatgcagaggtgtaaaagctgttagtattcagacatcacaaaatgtagtctaactctttagtacaagactaaatacttcttcttgaaactcctgacttcttggttaggaaaaaccccagttttcttcatggtgatagctggttacattcctctcggatggacgtgtaggtttcactgcacctatgattgttgaaaatgcttgtgaattactgtttagtaaagtgtctagtaaaggtgaaggggtgggttgcccctccacacctgtgggtgtttcttgttaggtggaacgagagacttggaaaagaaaaagacacagagacaaagtatagagaaagaaataagggggccccaggggaccagtgttcaccatatggaggatcccgccagcctctgagttcccttagtatttattgatcatttttgggtgtttctcagagagggggatgtggcagggtcataggataatagtggagagaaggtcagcaggtaaacacgtgaacaaaggtctctgcatcatagacaaggtaaagaatcaagtgctgtgctttagatatgcatacacataaacatctcaatgccttacagagcagtattgctgcccgcatgtgccacctccagccctaaggcggttttcccctatctcagtagatggaatatacaatcgggatttataccgagacattccattgcccagggacgggcgggagacagatgccttcctcttgtctcaactgcaaagaggcattccttcctcttttactaatcctcctcagcacagaccctttacgggtgtcgggctgggggacggtcaggtctttcccttcccacgaggccatatttcagactatcacatggggagaaaccttggacaatacctggctttcctaggcagaggtccctgcggccttccgcagtgtttgtgtccctgggtacttgagattagggagtggtgatgactcttaaggagcatgctgccttcaagcatctgtttaacaaagcacatcttgcacagcccttaatccatttaaccctgagtggacacagcacatgtttcagagagcacgggattgggggtaaggtcatagattaacagcatctcaaggcagaagaatttttcttagtacagaacaaaatggagtctcctgtgtctacttctttctacacagaaacaatccgatctctctttcttttccccacaaaagttgcctgagatacgttttatcctagttcaatgaaaattattgtacaaaagtgtttattataaaatcaacatgatttgtttattgtttattgattatataattatatttattatacaataaatatgattttgctagaagagcattttgccaaaagttgtggaaatgtcattgtcagattatggtatgaagcaattttttcaggctgagtgggggtggctcacctgtaatctcagcacttcgggaggccaaggtgggagaaatcacttgagcccagaagttcaagaccagcctgggcaacatagcaagagcttatgtctacaaaaaaattttaaaaatagccgggtgtggtcatgtacacttgtggtcccaactacttaggggcactgcagcaggaggatcgtttgatgccagaaggctgaggctgctgtcgtccttgattgtaccactgcactccggcctggatgacagagggagacactgtgtcaaaaaaaatttactttgtgcttctttatatgagttacattaaaaatcttttataaattgcagtccaggttccatgtctaatacgtttcttccatgtgttacttgagtgaaaatttacgggctacataaatatggctgttgtttggaaagaaaatgttgtgacattagtatgcgcacaagacaatgggaagtacgaactaggattcctgtaaatacgagaaaggaaaagaatgcttttactatgttagaagacttaaaatcacatgaagtgattccagtctttctgttgttattccgatgttttagctattttagattttggggtttggcttttttttgtttcattgcctttctacataattggataaccttgttagtatctgcagaatgccctgattaggaaatgtgttaaccctatgtgtcaatttggtataatttcatattgttttcatattgttttatgtggagtcttccaataaatgtatattgtatatgtgtctgtatttggtgtctttgatttctttcatcaacattttgtagttttaacataatggttctatgaatgttttgtttggcacgtatttctttgacttttttttaagacacagtctcactctgttgcccaggctggagtacagtggtgtgatctcggctcactgcaacctctgtctcctgagttcaagcaattctcctccctcagcctcccaattagctgggattacgggcacgtgccatcactccaggctaatttttgtatttttagtagacatggggtttcaccatgttggccaggctggtctcgaactcctgtcctcaggtgacctgcccgccttggcctcccaaagtgctgggattactggcatgagccaccatgcccagctgaccgatattgttaatggagcaatcatacatggtattttatttttaataccagctttcatgtgtaaagaaatatgctagattattattattattattattattttgaaataacgtcttactctgtcacccaggtatagtgcagtggagcgatgtcagctaagtggaacctctgtcctgcagctttaagtgaccctcccaccccagctgcctgagtagctgagactgcaggtgcgtgccaccacggccagctaattttcgtgttttgtagagacagggttttgccatgttacccatgctggtctcaaactcctgagctcaagcaatccacctgccttggcctttcaaagtgctgggattacagggatgagctgccatgcctggccagtgaaatatacaagattgctgtatgttggccagcgcggcggctcatgcctgtaatcccagcactttgggaggccaaggcgggtggatcacaaggccaggagttcgcgaccatcctggctaacacggtgaaaccccgtctctaccataaatacaaaaagaaattagccgggcgtggtggcgggcgcctgtagtcccagctactctggaggctgaggcaggagaatggcatgagcctgagaggcagagcttgcagtgagccgagatcgtgccactgcactccagcctgggcgacagagtgagactccgtctcaaaaaaaaaaaaaaaagattgctgtatgttgatcttataccttgccacctttacatttcccttgtttagagatttttgtagattttttggaattttctacataaaattatttcaccagattcttattgctaccacacagtgattggcttaaaacaagaaaaatttatttttttacaattctgtaggtcacatatctaatatgggtccacagttctatgattcttcatgaatctccaggcaagaattttttttccttaccctttgtaggttccagaggccacttacatcctttgactcatggtccacttcctccatcttttttctgagatggagtttcgctcttgtgtccctggatggagtgcagtggcacgatcttggctcaccgcaacttccacctccctgattcaagcgattctcttgcctcagcctcacaagtagctgggactacaggcgcgtgccaccacaccgggctaatatttttattatttttagtagagacggggtttcaccgtgttaaccaggatggtcttgatctcttgacgtcgtgatctgctcgcctcggcctcccaaagtactgggattgcagtcatgagccaccacacccggcccacttcctccatctttacaggcgagataaaatctctttatccctctattttcaacacatcacaactgtccgtccctcagggtctacctgcatccttctgatattgaaccttgtgattctatcactttgaccatataattcaggataatgtctatctaaagatccttaactagaccacatttgcaaactcctctttgccacagccagtcacacaggttacagggttgaggatatgagaacatattcagtaacacaggttacggggatgacctgtgcaaccatcatattttctgagagtacactattttttttctcctgtcctcaagccactctccttcctcattgctaccacacggtgattggcttaaaagaacaaaaatctattcttttacaattctgtaggtcatgtatctaatatgggtccacagttctgtgattcttcatgaatctccgaaagtgctgctattacagccctcagataccacatccagcctgtcacttttatttccttttcttcctttatttcactggctggaacttttcacactgtgtggaatagtagtgataaaagtggacttccttgcctcatcccctacccctgggggaatctttatgtctttcaccagaatgtatgatgatcctttttaaattggtgggtgatcttgagttgaggaagtgtccaatgacactgttttccataccatctgcagtcttgtttttctgaaaaattactttttttattggcaactgtcaaaagagatattctcaagacttggaacaagggcagaaacccctagacagatggttttttcttttcttttctttttttcttttttgtttttttgagagagagtctcgctcttgttgctcaggctggagtgcaatggtgcagtcttggctcaccgcaacctctgcctccccggttcaagcgattctcctgcgtcagcctcccaagtagctgggattacaggcatgtgccaccacacccagctaattttttatttttagtaggcggggtttctccatgttggtcaggctgctcccaaactcctgacctcaggtgatccacccacctcagcctcccaaagtgctggattacaggcatgagccactgcacccggcgttttttttttttttttttttttttgttgttgttgtttttaattcatcaggctggagcagtgtttaaaccaatctggagttaccattccagctatggccacaacctgatctctacatcttggccttcttcacattggctggaagctggctcacttcacccaagggcgtagtttgacggcattcatgctttccacaagtttgagcatccctcgctcctggcactggcagtgccactcagccatggactggggcatccacttggtctggcacttgtataaatagaagccgtaaccgacaacctcggtgaggtctgaagactccagagccttcagcacgagcatgaccttgctcacctgctcgatgtaagggatttgagatcagtctgggccaaacatggcttccagcagctgcatctggacctggagcacctctggatctttcaggaagtttcacccatggtgggatatttctacatctgggattgttcccaacttgtaaccctcacaaccaaaactatgctcccgcatgagccgggcctaagcgttcatcagtatttttgattcccaccaaatgtatgaagattacaatttcttcacagccttacttgtgaagcaggttcactgcacactggttaccaacgtgttggagttgagtgagagatagtcccatgaacacacagtaagttacatgaagtgaatttgttacagattggcagcaacgacagcagatgcctggggttcatgcatgctgttcccgaaggctcaggaaaaccacccagttcagatgcagtctgcgtgtgtgttcctcccgcatcacagctgagggagcctgaaaggcggcctggcccaggtttcatgctccagggatgcatggcacgttggcctaaaacaatgaagggcatcctgttctgaggggactggaacagatcctgtccttctctggtaaggatggacaggatcctgtccttctctggtaaggatggacaggatcctgtccttcatctcagtatgttgcttttctagcacattttatattcattcttgggaactacaagtgagaagtcagacgcaactgggccagttcaaccccacttgagtgctgtcttgcagtctccccaccaacccagtatcccctttaataaagctagtcaatttatgtgtgcactgaccttcctggatctggaggtagaggcttgtctcaggagattgaagtaatatcttgactggcagaatctcagcgcgacatcactgaggtacagccagttgcatttcactaggctcaagaggattgctgcctcaagcaggataaccaggcctgcctggaacagtgccatagtccgggatcccagtgacctgggtgagaagttgctattcaggtcaaagaaaatttcttcaggtgaccccactgtctctagccaatagtcctgcttgtggatcttacgtatttgtgtttcaaaactacctgaggtcctgatgtggggtccttacctcctgtgcacagtgactcatgcctgtaatttgagtactttgggagtgtagacagaaggaaaacttgaggccagaacttggacacccggctgggcaacaaagtgagactccatctctacaaagtaataataatatataaaactaaaaaattagcacagtccaatgtcacaggcctgtacttccagctactcgggagactgaggtaggaggtgcccatgaccccaggaagtcaaggttgtagtgagctatgattgtgccactgcactccagcctggatgtcacaggttgattccctgtctttaaaaaaaaaaaaaaagtcttaaactaaataatttatacctatttttaaagttattggcttttttaaaaagagttggtgacctgacttcacactgaccttagtcctctatgcccaaggtggtgtccctaggaaagtttctggaattgagcacagggttgacctcaccctctggagtgaatggggaatgtaaatgaaaagtatttctagccgggcgcggtggctcacgcctgtaatcccagcacttagggaggctgaggcgggcggatcatgaggtcgggagatcgagactacggtgaaacccagtctctactaaaaatacaaaaaaaattagccaggcatggtggcgggtgcctgtagtaccagctactcgggaggctgaggcaggagaatggtgtgaacccgggaggcgaagcttgcggtgagccgagattgtgccactgcactccagcctggacgacagagcaagactccatctcaaaaaaaaaaaaaaaagtatttctattctatggggcattggcatgatactgcgcattccactctggcagggtttagcatttcacactttagcttccatccccttcacagatagttccaaagtgtcttaattcctaaaatttgtctttctggctgggcatagtggctcacgcctgtaatcccaacactctgggaggccgaggcgggcagatcacctgaggtcagaagttcaagaccagcctggccatggtgaaaccccgtctctactaaaaatacaacaaattagtcgggtgtggtggtgcgcacctgtaatcccagctactcgggaggctgaggcaggagaatcacttgaacctgggaggcataggttgcagtgagccgagatctcatcattgagcttcagcctgggcaacgagcgaaactctcaaacaaacaaacaaacaaaaaaaatgtctttctttcgttctttcttgtctctccctttttctcacacacaggcacagacacctacattcttttctttgttgcactatttctctctagtcttattttctttctttcttttcttttttttttttttttttgagacggagtctcactccatcgccaggctggagtgtagtggtacgatttcggctcactgcaaccctgcctcccgggttcaagtgattctcctgcctcagcctcccgagtagctgggactacaggcgcccaccaccacacccagctaatttttgtgtttttagtagagacgggggtttcatcatgttggccaggatggtctcgatctcctgacctcgtgatccgcccggcttggcctcccaaagtgctgggattacaggagtgagccaccgcacccggccttgtctttctttttgctttcttttcacgctctcttctctctctgcttccagagtagttgggacttaaaatttattgtaataacaggaattctcgtggatctaatctaatcaccaaccgattttgctctgccccagcaagatctgtttacagatctgtttacagaagtgctgagcagatctcgcctccaaaaccctaaaacaggatcgctgagtcagactgacagaagcatagaccccgccttgagcccgccctgtcccggccctgccctcggccccgggcccggcctgtacgatgcgcgcgcaatttcctgcagacccggaagtcgagatcatggagtgaacgtttcgcgcgctttttcctgtagacccggcacccgactgcgcggaaagactgtctaagccgccactcgtgagtttgcctttgtctagattaaatttaggctgcccagttcctgtgtgcttctacacccgcgatctgagggctcatgcagaccttgaagtcccggcaccgctctatccactccaagtaaattcagacattctctagagagtctggaggtcgcttacctgcgtgttaaaaccgcttggaggcttctaggccgggcgcggtgcctcacgcctgtaatcctggcactttgctatttttttttcattttttgtaattattcagtctagttgattgaatccattgatgtgtaccccagagataccaagggctgactttagactgtatctgctcgttagtcacttaatagtctttttttttttttttttcctgagactgagttttgctcttgttgcccaggctggagtgcaatggcgtgatctcggctcactgcaaactccgcctcccggattcaagcgattctcccgcctgggcctcccgagtagctgggattacaggcatacgccaccatgcctctctaattttgtatttttagtagagatggggtttcaccatgttggccaggctggtctcgaactcctgacctcaggtgatctgcccgcctcatcctttcaaagtgctgggattacaggcatgagccaccgtacttggccaatagtcttttggatgagatccacttttatggtatctcagtgcttttttttcatgtaacccttttttttttcccttaacaatgccctccaggcacatgagtattgattgatgctgacaattttttttttgggtttttttgagacagagtctcactctgacgccaaggctggagtgcagtggcactgtgttggctgactgcaacctctgtctcctgggttcaagcaattctcctgcctcagtctcccgagtagctgggattacaggtgtccaccaccacggccggctagtttttatatttttagtacagacagggtttgaccatgttggccaggctggtcttgaactcctgacctcaggtgatccacctgcctcggcctcccaaagtgctgggattacaggcgtgagccactgcgcccggccttgatgctgacaatttggatatgccagtgagaagctgtaacatggagtctttaaggggaattaatagggtttagtactgatggaggtttcaggcatccattggggctcttggaacatagtgcacatcgataaaaggattctactatagtctatatctagaattgagcactgtgatccacagagggctgaggggcctgtgctctgcatgagctttggtcagggtgaggtctgtgctttttttttgtttttttttgagatagagtcgcactctgtcacccaggctggagtgcagtgttaaaatcttggctcactgcaacctctgtctcctgggttcaagcaattctcctgcctcagcctcctaagagctgggattataggtgcctgccattacccagctaaattttgtatttttaggagagacggggtttcaccatcttggccaggctgatcttgaactcctgacctcgtgatcgacctgccttggcctctcaaagtgctgggattacaggcgtgaaccaccacacatggccttttttttttctttttcttttttaagatggagtttcaccctgtcacccaggctggagtgcaatggtgcgatctcggctcactgcaacctctgcctcccaagttcaagggattctcctgcctcagcttcctgagtagctgggattacaggcccgtgtcaccacgcccagctaattttttgtatccttagtagagacgagggtttcattatgttggccaggctggtctcaaactcctgacctcatgatctgcccacctcggcctcccaaagtgctaggattataggtgggagccaccgcacccggccaagtctgtgcttttaaggggagcttagtcaagcccagctctgcactgctgcagtgtgtgtgtcgctcaccatgagacaggagagagttttgaggaagggagtaaaaaactcacttgttgattttcctgtgggagatcaacagtaggcagcagaggaccatccttccagaaggtgaagtcttccctttttgtgtggctgtggcacaggaagtgggtgtgttgattctaagccctaaacagcattatttttgatactaggattcactttcaaagagacatattatgcaaggaagcaactcggaagaggaaagaaaggaagtcaggaatggcccttactcaggtaaggtaatgttctcagtggattgttctgtctctgtttcttcctgaaatgccaggcattggagttgctaatctctgactctgaagcatcctgcctgactcatttcattgcacttacccatggcttcttccagtccctttcacttccacttaagattccagttccctatgacccaatgacatgaacttgggaagaggttccactgggcatggtcctgggaagtgctcacacccagacacggatggagatggggtgtgggccttgtggtgtcagtgctgttgggcagcagggattgttcaggggccacatctggatgcactgtgagtgttctgtggactaagactagagaagctgcatgtggaattcctttttttttttttttgagacagagtctcgcactgttgcccaggctggagtgtggttttgtgatctcggccatataaatgtatatgtgtactagtgtatatgagtgttagtatatatatgtgtaagtgtgtacatgtgatgtgtttgcatgagtgcacagatgagcaaacctatagtttttataaatagcatgtcatcattatatatatatatatttttatcagttgaaattacatctatttatcaggatgttcaaatttttctacattatcatgtatgatgatatgaggcatcatacctgatagtggctataagaggcaatgaggcaatggctataagaacattatagtaatgtattatggggatatcgattatatatatgcatatataatgaactattaggcaattccatgtttttaatccttgaagttgttttaaatttactgaattaggtaactgtcaatttacttttgatgctgatctgttacttaactgtctgattctttaggtttgattctcatgctcagacacctgtgatctgctgcttactctgctgtttcagttctcacacctggggcaagctagcgtgtatgtgaaagagttgtctttttagtaagataggagcagattattctttcattggcttttgttgctgtaccagttagttcatgtaaatcattgagaatagtgcctatcacatgggaagtgttctattcagccattgctgttgttatcatcgcagttttcagattttcaccattttttatttattttatttatttatttattttttttgagacagggtctcgccctgtcacccaggctggagtgcaatgatgcaatctcggctcactgcaacctctgcctcctggcttcaagccattctcctgcctcagcctcctgagtagctgggattacaggtgcacacctccatgcccagctcattttttgtatttagtagagatggggtttcaccatgttagccagtctggtctcgaactccttacctcatgatccacctgcctcggcctcccaaagtgctgggattacaggtgtgagccactgcgcccggcccagattttgaccatttttaaaaaccactataggtcggatgtggtagctcatgcctgtaatcccagcatttttggaggctgaggtgggaggatcacttgagcttaggcctttgagacaagcttggacaatgtggtgagactctatctctacaaaacatacaaaaattagctgggcatagtggtgtgagcctgtagtcccagctactcgggaggcttaagaggatcacttgagcctgggaggcagaggttgcagtgggtggatatcacacccctgcactccagtctgggaaacagtaagatcctatctcaaaaaaaaaaaaaaaaaaaaaaaagaaagaaagcactgtagacattgtcatctctgaagacactacttgtatctcaggtagatactaaatgtcacttgatgtgtcaaaaataaaacctaacatttctttctctttttgggggggggaggggacggagtctcactctgtcacccaggctggagtgcagtggcgcaatctcagctcactgcaatgtcccactcctgggttcacaccattctcctgcctcagcctcctgagtagctgggactacagacccccaccaccgcgcctggctaattttttgtatttttagtagagatggggtttcaccgtgttggccaagatggtcttgatctcctgacctcgtgatccgaccgccttggcctcccaaaatgctgggattacaggcatgagccgccgtgcccggcagtaatacctaacatttctatacagataaccctggtttaattttttgtttgtattgcttgtattatccacaaaatgagacatctactctgatttaaagaatgtcatcactccttatggaaaagtataataaaacacaatcacagacacataactagctcaagaatcctttaatgtggatttggcgcagtgctcgcttcagtggagtgagtccttacaactgtcttctcattctgtttgaagataagtactctctccataccctgtttttgaaatgtggatttccttttaggggcaattgtcattcagcgatgtggccatagaattctctcaggaggagtggaaatgcctggaccctgggcagaaagctttatacagggacgtgatgttagagaactacaggaacctggtctccctaggtgaggataatgtccgtccagaagcctgcatctgctctggtatatctttttgcattttctcttgtgtgtctctcgggagcccctgcattgcttgactgagattgaaacctgttgactaagaaatgaaaagcaggccaggcgcagtggctcacgcctgtaatcccagcactttgggaggccgaggcaaatggttcacgaggtcaggagatcgagaccacggtgaaaccccatctctactaaagatacaaaaaagggtgcctgtagtcccagctactcgggaggctgagacaggagaatggcgtgaacccgggaggcggagcttgcagtgagccaagatcgcaccactgcactccagcctgggtgacagatcaagactccgtctcaaaaaaaaaaaaaaaaaaaaaagaaatgaaaagcattatgctttctgaacttgaaatgtccccttacaccagcctgaccaacctggtgaaaccccatccatactaaaaatacaaagattagttaggcatggtggtacatgcctgtagtcccagctactcgggagactgaggcaggagaatcacttgaacctgggaggcaggggctgcagtgagctgagatcatgccactgcactcaagcctgggcaacagagtgagactctgtctcaaaaaaaaaaaaaaagaaagaaatgtcccctttcttcagatattctgcttccttcatgattcatcattgatggcaccagggctgaagtgtgcatgaaaccttatgacagacttaaaaaatatccagttccctgttttctacccatgtgcttttgattcagtagttcttgaaagggggcttgacgtctacatgttacaatgttcccttagcattcagaaggatgcaatcagtggttgaatttgtgaaatattattcttgattaatttgtaatatgctgtctcctacctaaatatagggcttggactttggagatgccacagcacacatttattctttctttttgtaagtaggaatctgtcttcctgacctgagtgttacctccatgttggagcaaaagagagatccctggactctgcagagtgaagtgaaaataataaacaatccagatggcagggagtgcatcaaaggtgtgaacacaggtgagagctcaggtgggcagagtggaggccccataatttttgtattttgagaagggtctcactctgtcatccaggctggagtacagtggcaatcatagctcacagcagccttaaactcctggacttaagggatccttctggcttggtcttccaaagtgttgggattacaggcttgagccactatactctgcagagccacactattacatagtgtttgggaaactctgcaagtgggtgaattctgtgggaaaaccaaagctgaaatcctttgagttgtgaacagacatttttcattttcttttttctgttttgagatagcgtctctctcctgtcacccaggctggagtgcagtggcatgattatggctggctgcagcctcaccttctggggctcacgtgattctcccacctcagccttctgaatagctgggactctgtgtgtacaccaccatgcctatctagttttttgtatttttagtagagatggagtattgccatattacccaggctgtacttgaactcctgacctcaagtgatccacccacctcagcctcccaaagtgctgggattacaggcatgagccactgtgcccagcctcacataatgatttttgagttctaattaactttctcagttcttctttatctaggaaagcctgaattatttttgtagatgagttttactaaatatagtattcttcattgatgtttttcttatttttcttcttcttctttttttttttttttttgagaccgtctcactctgtcacccaggctggagtacagtggcatgatcttggctcactgcaagctctgcctcctgggttcacgccattcttctgcttcaacctcccaagtagctgggactacaggctcccgccaccatgcctggctaattttttttgtatttttagtagagacggggtttcaccgtgttagccaggatgttctcaatctcctgacctcatgatccacacacctcagcctcccaaagttctgggattacaagcatgagtcaccgtgcccggcccttatttttctttaagcactttcagtatcacttcactgccttctaccctgaagatacctgctggaaaaatacacatagacttatacagtttcctattatatgtcaagtctctttttttgttgatgctatcaaactttgtctctgtctctctttgacttttgataatttccttatattatgtccctgtgtgaatgtctttgggctaattttagtaatggtcaagcttcttgaatttgtatattcagttctttcctcagatgtgtgatgttttaacattatttcttcagttgtggcttttcatcctttgtcatcttcatatgaacctccaatagtttgtatattgttccaccttatagtctctcaaaaatgtattagggtttgtaaggttttcttcatcatgttttctttgtggtctttggaactgatacttttgaataacttatctttcagtttgctcattgttttcctttccttttgctgtctgctgttaaaccccctaatggatttttacatcagttactgtatttcagctccagaatttctgttctcttgtttttaatgatttcccctgtgtttgttatcctcattcttttcacatactgtttttctgattttatttagttttctatttctgttatcttttagtttggtgtctggagttttatttatttatttatttgttattcttctagccatattttctcatcttttcataggccttgtatggtagtttttggtttaggtttggtaaaacaaccacttttttcagttattttttataatgcgcagtgggagaccttagttgctgtaagggtgtgggaacactccattcttttctgggatgtatctttcctgactttgtgaaagtactattacaaatatctacattgctgctcttaaatatcttattttccttaagaggcttatccctgctttttcacagaagctgttagttactcttgtatttgtcagcttataatctctctcaagctttcccttaattcccctgactcctgcagattccagattcttcagtaaatcacctcactcccttgtgttttctgcattaccaacatgttatacaaagtatgctgatactggccaggcacagtggctcatgcctgtattcccagcgctttgggcggctgaggcaggtggatcacaaggtcaggagtttgagaccagcctggccaacatagtgaaaccccgtctctactaaaaataaaaaaagttagccaggcatggtggcaggcacctgtaatcctagctacttgggagggagaattgcttaaacccaggaggcagaggtagtagtgaactgcaatcacaccattgcactccagcctgggtgacaatgtgagactccatctcaataaaaacaaagtatgctgataatttcaatgtctgagtgaagtgatgcagaatcttgttttctgtcagactttaaacatgccagaatcgggattaagttctaaaattttcttgcttttctagagaagagttctaaattgggaagcagtgcaggaaacaagtcacttaaaaatcaacatggattaactcttcagttacatctgactgaatggcagccatttcaagctgtaaggaatatttatggatgtaagcatgttgagaaatctatcagtgacaattcttcagtttcaccagttcaaataagttttttcagtgtcaaaacccatatttttaataactacagaaatgattttcttttttctacattactcccacaagaacagaaagtacacattagggaaaagccttatggatgtaatgagcatgggaaagtcttcagagtgtcttcaagccttactaaccgtcaagtaatccacattgcagataaaacttacaaatgtagtgactgtggcgagatctttagtagcaattcaaactttgcacaacatcaacgaatccatactggagagaagccttacaaatataatgaatgtggcaaagtcttcaatcagaattcacaccttgcacaacatcagaaaattcatactggacagaaaccttacaataacaaagaatgtgggaaagtctttagtcaccatgcctaccttgcacagcataggaaaattcatactggagagaagccttacaaatgtagtgaatgtggcaaagcatttagtgtgtgttccagtcttactgctcatcttgtaatccatactggagagaaaccttatgattgtaaggaatgtggcaaggtcttcaggcataagtcttccctaaccactcatcagacagttcatactggagagagaccatacaaatgtaatgaatgtggcaaggggtttagtcgaattgcattccttgcaaggcatcggaaagttcatactggagagaaaccttacaaatgtaatgagtgtggcaaggtctttattggcaattcacgccttgcacgacataggaaaattcatactggggggaggcgttacaaatgtaatgaatgtggcaaagcatttagaacgtgttcagatctcactgcccatcttctaatccatactggagagaaaccttacgaatgtatagactgtggcaaggtcttcaggcacaagtcttccctaacctatcactgtagaattcatactggagagaagccttacaaatgtaacgaatgtggcaaggtcttcagtcagaattcaaaccttcaacgacataggaaaattcatactggagagaagctttacaaatgtaatgaatgtggcaaggtcttccgtcagaattcacaccttgcacaacatagggatattcatactggagagaagccttacagttgtaatgaatgtggcaaggtcttccgtcggaattcacaccttgtgcgacataggaatgttcatactggagaaaagccttacagttgtaatgaatgtggcaaggtcttcagtcggaattcacaccttgcgcgacataggaatattcatactggagagaagcctcacagttgtaatgaatgtggcaaggtcttcagtcggaattcacaccttgcgcgacataggaaaattcatactggagagaagctttacaaatgtaatgaatgtagcaaggtcttcagtcggaattcacgccttgcacaacataggaatattcatactggagtgaagccttacagttgtaatgaatgtggcaaggtctttagtaaaaattccatcctagtacaacattgcagtattcataccagagagaagccttaaaaatttagtgaagctggcagggcgcagtggctcacgtctgtaatcccagcactttgggagtccgaggcaggtggatcatgaggtcaggagattgagaccatcctggctaacacggtgaaaccccatctctactaaaaatacaaaaaaaaaaaaaaaaaaaaaattagctgggtgtggtggcaggcacctgtagtcccagctactcaggaggctgaggcaggaggatggcatgaacctgggaggcagagcctccagtgagccgagtgagccactgcactccagcctaggtgacagagtgaaactccatctcaaaaaaagaaaaaaaaaaaatgagtgaagctgccaagcatggtggctcacgcctttaatcccagtactttgggaggccaaggtggccagatcacctgaggttagaagttcgagaccagcctgaccaacatggagaaaccccatctctactaaaaatacaaaattagctgactgaggtggcaggcacttgtgatcccagctactcaggaggctgaggcaggagaattgcttgaacctgggaggcagaggttgtgatgagccgagattgcaacattgcactccagcttgggcaagaggagcaaaactctttctttaaaaacaaaacaaaaaaagttatgaagcctcacaaaagtaataaatatggcaaagaatttcatatgaaatcatgcctctctacccatctattaatccatactggaaggaaaccatagaaatataaagaatacaagaaggtcttcaggcacatgttttccctaacctctcatcaagagaattcacactggtgattgactttaaacatataacaagtgtggcaacgtattcacttaaaatacacaccttgtaaactatcacagaatccatactggagagaaaccttacaaatgaatgacagcatcttcaaataaaatgcacatctggcacaacattggaaaattcatactgtagataccttttaaatgtagcaaatatggcaaagtcaaagtcacaattcacatcttgcacatcaaataattcatactggaggctgggtgcggtggctcacgcctgtaatcccagcactttgggaggctgaggcagacggatcagttgaggtcaggagtttgagaccagcctgaccaatgtgttgaaaccccatcactactaaaaataaaaaaaatagctgggtgtggtggtgggtgtctgtaatcccagctactcaggaggctgaggcaggagaatcacttaaacccaggagatggaggttgcagtgagccaagaatgcgctactacactccagcctgtgtgacagtgagattctgtctcaaaaaaaaaaaaaagaattcatactggaaggaagcgttacaaatgtaatgaatgcggcagagcattgagaaggtgttcaggtcttaactgttcattttgtaatccatagtggagataagtcttttttttttttttcccccgaaacaagagtctcgctctgatgcccaggctggagtgcagtggtgtaatctcagctcactgcaaccgccacctcctaggttcaagcaattctcctgcctctacctcccgagtagctaggactacaagcacatgatgccatcatgcctggctaattttttgtatttttagtagagacggggtttcaccatgttagccaggctggtctcgatctcctgaccttgtgatccatctgccttggcctcccaaagtgctgggattacaggcatgagctgctgcacccagcttgagaaatcatatgaatatatggaatgtactccaggcatggtggctcacacctataatcccagccctttgggaggccaaggtgagaggattgcttgaacccaggagtttgagaccaacctgggtaacataaggacaactccatctctacaaataataaaaaattagccaggtgtgttggtatatgcatgtattcccagctacttgggaggctgaggcagaaggatcatttgagcctaggagcttgaggctgcagtgagtcatgtttgcagtactgcactccagcctgggtgacagagtgagaccctatctacaaatataaacaaacaatgtgaaacgtcttcagtcacaagtattccctaacaaatcactatagaattcatactgcagagaagccttacaaatgcagcgaatgtgacaaagcatttagataatgttcaggctttactgcccatcttgtaatccatactgcagacaaaccttacaactgtaatgaatgtggcaaggtctcaaattgaaattcacatcttgcgaatcaccacatagagagaaaccttacaaatacaaatcaccacatagagagaaaccttacaaatacaaatcaccacataatggagagaaaccttacaaatgcaacatatgtggtaaaatgttttagtcacaattcacaccttggacagcatcagataatttattcatgaaagagtccttacaagctgtgtacggaaagctcgtcatgagttttagcattaatgaacatcagaggttccatactaaggagaaatcatataaatgtaatgtatgtggcacaggctttcctgaggcctgccaaatcactagaaatcaaaatatacttttggataaaacgacacagatggattgtatatgctgaggatatccaaggaccattactatagaacatgaaaaggatttaattattgttttcttttttcctaaaagtgttgggaacaggccaccaaaactggccataaacaaaatctctgtaggactgtgacatgttcttgatgggcatgacacccatgctgaaggtcgttggtttaccagaatgatggcaaagaacacctggcccacccagggcagaaaaaccgcttaaggcgttccagaaccacaaataatagcatgtgcattctgtgccttaaggacatgttcatgctgcagataactaaccagagcccatccctttgtttcccataaggaatgcttttatgtaatctataatcaatagaaacaatgcttatcactggcttgctctcaataaatatgtgggtcaaactctgttcatggctctcagctctgaaggctgtcagtcccctgattttccactccacactatatttctgtgtgtgtgtctttaattcctctagcaccgctgggttagggtccccatgactgagctggtctcagcagaaagctactttcctctttataactttcaacctgaactttgagatcttgacatatacctcctcctacaggcctttcactgtggtctctgggaaagaatcaagtgaaagaatcaataggatgacagggctgatttcattagctgaggatcacttctattcagcttcctggaagaagaacactgtctttttatattaaatattgtctgatttagacagcatggacatgggtagagaataacataaaatgatgactgcttgaagcagtcacgcttattcttttcttgagtactgcccactcttttcttgacaaggatgcagtacttctgtgctctaataaataactgtaaaatagagcatgccattaaaggcatggcatttttatgggaagagaataattgttgttaggtattgattacgtggtagcaatcatggaggggaaggggtggtcacctcctcaattgaatagcaatagttcctgtttagcaaagatggaaaacagtagtcttatttttgaaatggaagagaaaacatgcattttctcttaagtctgagcacacagaatgggaatgttgttaattttcgataacctgatgacagtgtgcctaggtgattatctttttgcgatgaatttctcatgtattctttgagcttcttatgtttggatgtctaggtctctagcaagcctgggaaagttttcctcagttattaccctaaatatgttttctaaacttttagatttctcatcttcctcaggaatgccaattattcttaggtttcatcgtttaacataatccgagacttcttggagactttgttcatattttcttattttttctttgtctttgttggattgagttaattcagaaacctcatcttacgttgggaggctgaggtgggcatatcaccaggtcaggagttcaagaccagcctggccaatatggcgaaaccccatctatactaaaaatacaaaaattagttgggcatggtggtgagtgcctatagccccagctactcaggaggctgaggcagaagaattgcttgaacctgggaggcagaggttgcagtgagccgagattgcgccattgcactccagcctgggtgatgtagtgagactccatctcaaaaacaaacaaaaaaaatcaccttgtctttgagctctgaaattctttcttctgcttgtttaattctattgctgagactttccagagcatattgcatttctgtaagtgcatccattgtttcctgaggtttttgttttttatttatgctatttatttaactgaaatttctcccctcatttattgtatcattttatttctctagtgcctccttgattagcttaataactgaccttctgaattatttttcaggtaaatcagggatttcttcttggtttgtatccattgctagtgagctactgtgattttttgggggatgttagaaaaccttgttttgttatattaccagagttagctttctggttccttctcatttgggtaggctgtcagagggcaggtctagggcttaaggatgttgttcagattcttgtcccatggggtattcccttgatgtagtactctcccccttttcctagggatgtggcttcctgagagctgagctgtagtgattgttatctcccatctggatgatctagccacccagcaggtctgccaggctccaggctggtactgggggttgtctgcacagagtcctgtgatacgaactgtctatgagtctctcagctgtggacaccaggacctgctccagtgtaggtggcagggggacgaaatggaatctgtgagggtcctgagttttggttgtttaaagtactatttttgtgctggttggcctcctgctaggaggtggtgctttcaagagagcatcagctgtggtagtatggggaggattaggtgggggcagggcactagaactcccaagagtatatgccctttgtcttcagttaccagggtgggtaaggaaggaccatcagttgggggcagggctaggtgtgtctgagctcagactctccttggcaggtcttggtactgctgctgtgggggatggggttgtggttcccaggtcaatggagttatgtttctaagaggattatggctgcctctgcagtgtcatgcagattgtcagggaagtgagggaaagccggtagtcataggcctcacccagctcctgtacaacccaaaaggccagtctcactcccaccgtgcccccatgtcccaacagcaggaagtctgtttccaggcagtgggcaagcagggctgagaacttgccccaggctaccagcctcccaactacaaaagcaagtaaggctttcgtgcctcccagcctgtggagtctgcacactggattcacgctcttccatgagttttggccaggagacttctcattcagttggaattgttacaaagttcaactggaggtttccttctccctgtggccttttcccagtgcctcttgcagccttcccccaggacccctgtgaggcaaggcagaaaatggcttgctaggggacccagagagcttttcccgctacccttgtttttcactcagctaatttttttttttttttttgagacagagtcttgctctgtcacccaggctggagtgcagtggtgcagtctccgatcactgcaacctccaactccagtgctcaagcgattctcctgcctcatcctcctgactagctgggattacaagcacatgccaccatgcctggctaatttttgtattttttgtagagacggggtttcaccatgttggccaggctggtctcgaactcctgacctcaagtgatccacctgcctcagcctcccaagatgctgggattataggtgtgagccatagcacccagcctcagttctctaaattgactgagttccaggtaaggtcagaatcttctcccatgatctagaccttcaggtttgccagtgacggtttgtgttcttggcagacaatcttcctttcccacttacacagtttgggcactcacagtatttggggtgtctcctgggtcctgcgggagcaagagcaaccaacttccttcagaggtcctgtgggttttcttggcttcctaatttactcttgcagtcattctggagcaaaaattcatgatgcaggactccacacactactgtccatctgagtggaagctgcaagttagtcctgccctgccatctgccatgatcctctgaaaacaagaatttttcttatatttttccttccacacattgtaatccttattatatgtataatttccatttcttacctgtgttactcctctgaaaaacacagggaatatataaatgaaagttttcttttgagacaaaattttgtgacatgaaaatgcacataacacaataactgatatgaactaggttctgtataattatgaaaaagaagtgttcctttaaatctttaattcaatggaggtaccaagttgatataagatggtcaactaaaatctcttaatgtgggtgcttgctctcttcaggtgcttgaaatcaagtgtgtctccagcatttgttgaagtaaatgaaaatataatgataaataacagaaaaagtcatcccccaccacatgccaattacagtttgtgacaaggagattatctccatgctcaatctcaaggccattctgcctcttctcactggatgatattcctattcccaccagaggatattacagggaaacatgacattagtgccactattaccatggaaactgacacccaacattctcccttcagatttgtccccacctaaaaaagagatttttgtatgtcaacggtgcatcctgagaccctgaaatttcactcactctagagattttttatactttttgggcttttctacatacatcattttattggttccctattgctgctataacaaattaccataaagtgagtgctttaaaaaaaatcccacaaatttggctgagtgtggtggctcgtgcctgtaaccccagcactttgggaggctgaagcaggagaatcatttgagctcaggccttcaagaccagcctgggcaacatagcaagacctcatctctactaaaaattataaaattagctgactgtagtagtacatgcctgatgtctcagctattcaggtggctgaggtgggaggatcgcttgagcaagggagatggaggctgcagtgagctatgattgcaccattgtactccagactgggtgacagagcaagatcctgtctcacacacagacgtacaatttattgtcttatagttctggatgtcagaagcctaatatagatctgcaatgctgtgattgttcttcaatcttgaggaaagaatttgttttctaacccttccttggttgcagagactgcatctctccttgccacatggtccacttcctccaccttcaatgtcagttgcagatcatcttatatctttatctctgtcctgatgttttcaccatatcaccaactactaagtgactctaactccacctgcatctttcttatactgacccttgtgatgatatcacctttataagaaaaaccaggacaaaatgtcatctcaagatccttaactagatgacatttgtgaaccctcttttgacacataaagtaacccagatcatgttgatcaggacatggacatcatttgggagaacattattcatcctattataactaatatattctgttaatggctatactattttatcctcctttctggtctcttacatttgtttttatttctttatttcactgggtacaatttctaatggtatggcaaaaagagtggacatacttgtttcattctcaacctctgtgttgaagcattcagttttgttttttgtttttctttttgttttaacactaacagtgacattttccctaaggtatgtaggtgttcttcaggaagatgaaaaagttttgctctattatcagttttgaaagtcagaccatagacaagtgttgaattttgttgtgtttttttctgcctctattgatagagtcctatgattttttaaatctttttatcatgttaatatcgtggattacattgatcaaattttatttttttcttctcataacgcagtgtagtagacagaacactgattgaattttaaatgattaaacagccttccatcctcaaataaaccccattaaatcatggagtacaaatctttttatatattgttgatttctattgctaatattttcttaagaattttgcgatttttttcatgtgaaatttagtttttagacttttttttttttctaattcctttgcctagttttggcaaaccataataatggtttcataaattaagttgggaagtagtccctcctcttctgccttctgggacaaattgtatataattgctgttaatacttctttacaggtttaatagaattgtttagggttaggctgagatgggaggatttcttaaggctaggagtttgagactagtctgagcaacatagcgtgacctcatctctaaaaagaaaaattttttggccaggcgcagtggctcacacctgtaatcccagcactttggaaggccgaggtgggctgatcacttgaggtcaggatttgaaaccagcctggtcaacatggtgaaaccccatctctactaaaaatacaaaacaattagcctgtaatcccagctacttgggaggctgaggcaggagaagtgcttgaacctaggagttggaggttgcagtgagccaagatcacaccactgcactccagcctgggcaatagagcaagactccgtctcaaaaaaaaaaaattattttttaaaattagcccggcatggtgttccatctacttgtgaatgtgaggctgagttgagtagacttattaagcccagcagtttgaggatacagtgagctatgattgtgccactgagctccaacctggatgacagagtgagacctcatctctacaaaaataaaaacaattgtctagtgttaccatctgtgcctgaaaattgcattatttgggcattatttgggagaatgttttatataatcaggtaagaacacaacgtgagctctagtctcttaactttttaagtgtacaattcagtagtgttattcaaccttaaaatcattcttttaacattttcaatggtatttatttatatggtacatgtgatattttgatacacacataaaatagataatgatcaaatcaggataatttaaatatccatcacctcaaacatttatttctttctcttgacgacctttcaactcttctagctactttgaaatatacaataaattattgttcactatagtcaccctactatgttactggagatgacaacttattccttctggttttttttggtacccattaacctacttcttttcatgcctgtgctaacctccccactctctggtaatgagcattctactctctacctccatgagattaacttttttagctcccacatacgagtgagagtatgagataattgtcttttctgtacgtggtttattttatttaacataatgacctccactttgacccatgttgctgccgcaaatgacaagattttattctttttaaaggatgaacagtataccattgtctatatatacattttctttatccatttgttcgtgatgaaaatgtaagttgatcccatatcttggctattgagaacagtgctacagtaaacatgggtgtgcagatatcactttgatatccggatttccatcctcattctctctctctctctctctctctttctctctttccaacagtggaattgctggatcatatggtagttctgtttgtagtttattgaagaacatccatactattttccataatggctatactaatttgcattctcaccaaccagtgtactagcattttcttcctttgcatattcaccagcatttgttatttttttttgtatttttgatgatagccattctaactgagatgacattatatctcactgtggttttgatttgcatttacctgatgattagtgatgttgagcattttttcataggcctgttggtcgtttgtatgtctccttttgagaaatgtcttttcagatagttggtccattttttaattggctttaaaaatttgtttgtggccaggtgtggtggctcacacctgtaatcccagcactttgggaggctgaagcaggtggatcacgaggtcaggagttgaagcctagcctggccaaggtggtgaaacgctgtctctactaaaaatacaaaagttagccaggcgtggtggtgtgtgcttgtaatcccagctacttgggaggctgaggcatgagaattgcttgaacccgggaaggcagacgttgcagtgagccaagatcgcaccactgcactccggcctgggctacagagtgagactccgtctaaaaaaaaaaattgctatcgtgatgtttgagtttcttatatattcaacttattaattccttgtcaaaaggatagactgtaaatattttctctaattctgtcacttgtctcttcactatgttgactgtttcctgtgctgtgcagaatctttttagtttaatataatccaatttgtctatttttgcccttgttgcctgtgtttttgaggtcttacctaaaaaatctttgcccagatcaatgccctgaagagttttcctattgttttcttatagttttatagtttcagatcttccatttatgtcaaaccattctgattttatttttgtgtatggtgagaaataggggtctagttttatttttctgcatatggggatccagttttccagcaccatttattgaagactgtcttttttcccaatgtatattctttgtcaaaaatcagctggctgcaaagatgtgggtttctttgttctctattctgttctgttgctctatgtgtctatttttatcccagtagcaagctgttttggataccattactttctagtatattttgaagtcaggtagtgtaatacccctcagtttggttctttttgctcagaattgctttggcttttttggatcttccgtagttccctatgaattttaggagttttttttttttttgtttttgtttttgttttttttttttagacaaggtctctattgcccaggttggagtgcagtagtgcgatttcagctcactgcaacctctgcctcccaggctcaagcgattcacctgcctcagtctcctgagtagctaggaccacaggtgcatgccaccgcacctggctaatttttgtattttttgtagggatgggttttgccatgttgcccaggttggtctcaaattcctgagctcaggtgatccgcccatcttggcctcccaaagtgctggaattacaggcacaagccacctcacccagccgtaggattcatttttttctatttctgtgaataatgtcttttgatattttgaaagagaatgtgttgaatatgtacattgcgtttggtagtatgatcatatacacaatattaattttttcccacccataaagatgggtagcctttacttttttgtgtaacctttccacttctttcatcactgtttataattttctacccatagatttttcacttctggcctgggacgcgcgcgtcttcagggtggaagcctggcgcgcgtccggaggtgctgaggagccaaccggcccaaactttgtgggaaatgactcccctctgccctcgcccctcgctctgctaccatttccttccgtttctgcttcgcttggcgatgcaaaacgcgcgaggctcacggcagagggccgaggccacgggactctcagggccgggcccgcccctcggccgcgcagtgcggcgccgcacgccccggacgctgtccagcgttggccgcctgagcagaggctgccgcggagctaagacacccgccgtttcacccagccagcgggcccagcccgcggaggagggcggcatgcagctccgcgttgcctggctctccgggcacgcgggctacgatctgtacagtgcctgtgattacacaccaccacctatggagaaggctcttgtgaaaacggacattcagacagcgcttccttctggatgttatggagagtagctccaaggtctggcttggctgcaaaacactttgttgatgtaggagctggtatcacagatgaagattatagaggaaatgttggtgttgtactctttaatttttgcaaagaaaagtttgaagtcaaaaaaaggtgatcgaattgcacagctcatttgtgaacggattttttaatccagaaatagaagaagttcaagctttggatgacaccaaaaggggatcaggaggttttggctctaccggaaagaattaaaatttatgccaagaacagaaaacgagaagtcatacctttttcttaaaaacaaagagtttttgcttaaagtgttttggtgttttacacttctgtaaacttactagctttaccttctaaaagtactgcattttttttttatgatcaaagaagagatcatttaaaaaaagcatttctttgtgtttggatcacaaagaaactttgtttttctgcagttgatggttatttgtaaatctactttgtggtgacctgatgtaaacagtgtcttcttaaatgtacatcaattacagattaaaaaaaaaatcctgtattatttaactcaagaaatgataccccttcagcaacttaaaaaaaaaagtttgtttttgttttgtgcgtgtgtgtgttttcttttttttgttttgtttttttggagacggaatttcactcttgttgcccaggctggatggcaatggcccgatctctgctcaccgcaccttccaactcctgggttcaagcaattctcctgcctcagcctcccgagtaactgggattacaggcatgcgccaccacgcccggctaattttgtatttttagaagacacaggatttctccatgttggtcaggctggtctccaactcccaacctcaggtgatccgcccgcctcggcctcgcaaagtgctgggattacaggcgtgagccaacgtgcctggccctgtgtgttttataagagagactgggactcactctgttgcccaggctagtcttgaacatttagcctcaagtgatcctcccatctcagcctcccaaagtgctaggattagaaacatgagccaacacacccagccaaaaatcgtcttttctatttacattcagagtgcgtgtaaatttgaaattcactctacgtatcgaaattattgacattatgatgtcaataaagtttatcgcagagacgtttgaggttaattcatctgaagtttggaatagagtaacaggtataagggagagctatttatatctattgtttaaaagtttaagagtcatttatatctatcatctaaaagttttagctttcctttttaaaagcaacatttggtgacctaacttatccctggcgttaaccctccatgcccaaggcgttgtccctgggaaattgtcaggagctgagcacagggttgatcctcaccctccagagtgtagggggaatagaaaaggagaggatttctactctgttctgtgggacgacagcatcaaattgcatgttccgcccaggcagggctttgcatttcatattctagttcgcttcctctcccagacaattccagggcttttaaattaaaatactaaaattaactttaattgcaggaactatcttaggtccaatcactgtcccctactttgaccctctcatagagatcccaggtcccagactgcttggctgctggtcaccgatagggtctttcctcaaaaacctggagaacagacgcgcccagagacaggccgaaggcagcgcagaccccgcccctcaccgccccaccctctcttctctcgggtctcgcccatccctggcctcagctgcgcgcggtttcctggaaacccggaagtgaatcatggggcgtgaactcgcaagcgcagtttcctgaagacccggaagccgatcgcgtggggagccggtcttggagcagcgggtgagtttccctttgtctagattagatccgcttccagcgcttctgtacctggtgttggcggaggggttcttacggatcttaaaatcctcccgccgttccctccatcctaggtatattaatacgtcgccaagaaattcggaggttaaaatcgcttggaggctgctggtcctttccctgagctctctgccttcgggccacgtagacgcttttcgtcccgtttacctgcttaaaaccctttactgaccactccttcggtcccgcgtcatgtaaaagccctcacccatgaggtgtattcacgcccagtgggtcctccaagcctcgcccttctggcctcttggagctcggtcccgcagtctcgatgcatcagcgccgtgtcctctgcccggccctgggattttggaaaccccacccctctcctaatccacccccaaccttgtcctccttgggctgggcccttgtgttccccaggtttccccttcacaacccacattccttaccccgcattgagggaggtgacggggcctggcttttgacactcagtgtttttccgttccaaattgcacccgctggaaaatgtgctcttccagaggaaaaacgattgatttattctttcctcctctgaaactcaacacggtagtaaacactgaacccagaatacttcacttgtggtcaccgaatgtgtggggatttctccccactaacaagcagttctctatcagacatcaactcggtgtcccataatttacctcacttctgacagctgtacctggtgtaagcatcggatcccacagattaaaggctcagtccacaagacttctccacttcagatgtcggttacaagtcccagattggaacctgaacttctaagctactggatataaattgaggattcccatgacccagtcttcagtatttattaatttgccagagtagctcacagaactcagaaacgttttagttgggtttactcatttgttttaaaggatattacaaaggttgcagatagacagatggaatagcagttctagaaaattagttgaatgcaggagaggatttgggaaccgtggtgtttatctggtcagtcagaagtagaggtgaaaactactacttgtgtacagcttctaaggtgaagggtagtcttgtgggactgagcttttcacccatgggatctgacactatctccttgtagatagtgtaagaattgagttaaattttaggattcccaggtggaagtctgcaaggaactggtcagtgtagggaaaccacacattttcttgaccagaagtaaagtatcctgtgttgagcacgagagcaatgaaaacagtttggttttttcctgtctcagtgaagggaagatatttgtaacaggctcacttacctgtctcaagccccgtgctttctactcagtattgactgggaaggatctgtccctgctctttgttttaattttcttgatgtcatcttcatctcttaccgtttttctctgctgatgtgtcctgactcactgttttctgaatgtgggaatgacccacagcttagtcctccaaccacttttcctctctgtccacgtctactgcctttctatctttttttttttttttttttttttgagatggagttttgctcttgttgtccaggctggattgcaatggtgtgatcttggctcaccgcaacctctgcctgccaggttcaaacgattctcctgcctcaacctcccgagtagctgggattataggcatgtgctaccacacccagctacttttgtgtttttagtagagatggattctccatgttggtcaggctggtcttgaactcgtgacctcgtgatccacccacctcggcctcccaaagtgctgggattacaggcgtgagccaccacgcccagccactgcctttctttatcatttcatctcatggttttaaaccctacctttatgtctccatccctcatagacctctctcctaatttctagaattctgtgtccagttgtctcctcaactttcttctgggacatccaacaggcatctccatatttacgtgtccactagtgacttcctgagttctccgatgtatgctcccttgcagtcctacccatctcagataagggtgaccccatacttctgggagcttaggtgaacatattggcatatatttaaaatctaggacatagttccttgtttgaaaatgttttagggaataatataaagaaaaaattacatgattgcttaaaatgggtgaggaactagcatttccaaaattcttttgagttgagggagaaaaatgtttaaaggcctccaccctatctgatctgcacccccaggacctctctgacctcatccgctacctgtgtcggccttgctccctctgctgtagctacacagatctcattccttttcctggagctgaggttgctcctgtctcaggaccttcacctgggctgtccctctgcctaggactctttagcccctcagttgcaggtgacaaacatccttccttttctaggcctgggttctgatatcaccttctcagtgaaggtttatgtgacccttcccctgtcacaacctcacctgctctggcccatattgcctcccctagatgtttctttctgctcttttgctgtccactgtctggatcctggtgacaacaaggacccaaggggagaccagagccagaagataggggttgttctgggcttgctccctctgagtttagctcaaccctggattcgcattagaatgctgagacattttgcaaatatatctcttgtgcctcctttccagagattcccatgcatgtaggttcaagcgcagtgtcccacatgattctaatctgtattcatcattgaacatcagggtgctgtgtcttccatttctgaaagctgatatcggcctgtgatccacagagaggggagaggctgtgctctgcatggggtttggtcagggccagatctgtgccctgaaggggagctcagtccagcccagcaccccacagctgcagcatgtatgtgggcttctccaggtggggagtaagctttgaagaactcaaaaactgacttgttcttcctgtaggactttcttgtctgcatcatccctggtgctgtgggcagcagagggccatctttccacagggcgaggtctttcctgtgtatgtggttgtggcacagggagggggtgtgttgattttgagcagtaaacagcatattttgaacactcaggattaacttgttttttaaaaagttttctttttctttttctttcaggattagcttctaaagtctctttcatctctcctaaggaagaagcctagaagaggaggaagaggaaagaaaaggagtcaggaatgcctcttaggtacagtgatattctcagtggactgttgtgtgtctccttcctttctgaaatgccatgtgtggtgttatgatatatattggtttccatcgacggttcctggcttataacctccatagcccttgttacaatcttttgttgtaatgttggatgtgttaagcctcaggggtaggcctctgaccttcttttgccttcctttcactctgatgctccccagcctttctaattgtgggtcttaagaccctcctccgagagcttcccaccctgtaccctggggggaagaatgttgatgtcatgaaacttccataaaaacccaaaagggcaaagttcgatgagcttctggatggctgaacacgtggaggttcttggaggtagtaagcccaggggcgtcatggaagccctgcactccttcctccataccttgctgtaggtgcctcttcgtctgtatcctttgcagtatcctttataataaactggtaaaggtaagtaagtgcttccctgagttctgtgagccaatctagcaaattaattgaagagggggtcgtgtgaaccccagtttgaagctgggtggtcataagttctgaaggcctggacttgcgactggtgtgtatggaggcaatcttggagactgagccatcaactcgtgggatctgacgtctccagtcttaatgtacacagtagatagtgttggaattaaactggaagatacccagctagtgtctgctgcttggtgtgtggggaaagtacccacatacatttagtcacagaggtcttctatgttgatgattgttgtggtgtgagagtagaggaaaagcacaatttgaggagagcttttccctgtacacatcaggcattggagatgtcagtcttctctgagtctgaagcatgctgcctgtgatgtttgctcacactcacccatgtcttccctcaggccctctgatgtcacttaaattccatctcacagtgactggtgctgtggaatttgtgaagaggctccattgggaagggcttatacccagacatggatggagacggggtgtgggccccatggtgtcactgctcttgggcagcaggaattgaaggattgtttaagggccaggtctggaggcactgccagctctgtagactggattatggaagctgctcgtggaagtcttaatgtgcacaactgcctgataaaatttggaagaagagattaggaagaggaaatcttttctgcctgattttatactccatttgtagtaaatgtttaacagcaagagattctttaaaccattctaagtacatccatcctatggagattgtggtattcctgcagagactcttgtgaaacagatgtttcaggtgaaaatggtaagacttgggtaatacttcttctaggatggggcatttcctattttcttagatctctcaaggttcccctgttatccccagctgcaggggtacctctcctatcaagaacatgtgaaattttgccctcattaaaaaaaaaacaacaacttgctactatgtttatatatatatatattttgaaaatctgggaaaaatgacaaccctctgtattttcatttttcaatttattgtctacataggttttattattttggggacatgtatatacaaaatgaattttcatgctttgctcaattttctttccatgtattttagtatgtgttttaatttctgtggtttttatttctttcatatgccctgatgtcttttatttcaggttatacattttttaattgtaagacaaatctttcatttataccttctgatttttgttgtgcctttgtttgtttcatcttgatttggaaggccttgcatgattatgaagtactaagtttcatttaggaataaagttttgttgtttaaaattttgtttacatttgtgtttaatttgaatttttgcgtatatcataagtatttgatttgttgtaaaattacagatgtttgtcataagaggttcttacatatttggaaaacccctccattttgtttttcttttcaaaattgtgatggttctcctttcacagggcacagtcattaaaaactcatatatttcttttgtgtttgaatggctgtggattcctagtcagagaggtctttgtgtcaccacatctgctaataagaattgggttttccggtccatgatgctctttgttatgtcttttagtaaagtttatttgcctgtttatagttcagtaatgttaagtatgttcacgttactgtgcaacatatctagaagtttttcatctcgcaaaactgaaactgtatacccagaatacactatatcccttctgacctcactatagcctctgtcaacccatctttctatgttgtttatatgcatttgactactttagtatcccacgtgagtggaatcacatagtatttgtccttttgtgactgtcttattttccctagtgtaatgtcctcaaggttcatccgtgttgtagcatatgacaggattttctccttttataaagctgaataatattccattgcatgtgtataacacattttctttatccattcatctgtagataggcatgttggtttttctgtcttcttggctattgtatataatgctgtgatgagcagggatttgcaaatatctctttgagggcctgctttcaagtctttaatgtgtatgtacacacacacacacacacacacacacacacacacacacatatatatactaccatatgatccagcagtctcacttctgggtatgagtgtgtatatgtagatatgtgtgtgtgtgtgtgtgtgtgtgtgtgtgtgtgtgtgtatatatatatatatatattttttttttttttttttttttttgagatggagtcttactctgtcaccaggctggagtgcagtggtgcgatcttggctcactgcaacctctgcctcctaggttcaagtgattctcctgcctcagccttccaagtactacaggtgcgtgccaccatgcccagctaattttgtatttttattagagacggggtttcaccatgttggccaggatggtctcaatctgttgacctcgtgatccacccacctcagcttcccaaagtgctgggattacaggcatagccaccgtgcctggccagatgtatattttcaaatatgtacgtgtgtgtgtatatacacacacaaatatatatacgtgtgtgtatgtatatagatgtataaaatatctacacacacccatgcccagaagtgggattgctggattatatggtagtactgtttttaatattttgaggaacccccttactgacctcagtaatgggtataccattttacattctcaccaactgtccacaaatgttccagtttctcagcatcctctccaacactttttttttttttattgatgatggccatcctaatgggtgtgaggtgatacctcattgtaatgttgattggcatttgtgttatgtttggtggtgatgagcatcttatcatgtgcttgttggccatattgtcatcttctttagaataacatctgttcagttcctttgcccattcattaattgggttatttatttttggtgttgagttgtagaagttacttgataatctattaatgcctatcagatatgtgatttgcaactcttctcccattccgtaggtttgccttttccttcttttgatcgattcctttgaagtgcaaaaactttaagttggatgtagatcctttagtgttttgcttttcttgcgtgtgcttttggtattatatccagtaaatcctttccaaaatcagtgtcgtaaggttttcttctatcctagtttgttacgtgtattaatctggaaatggtgttgaattgttcctaatgctttttttgcatcaattgagatgatggcattgtttttgttctgaattatattaatagtagtgatatagtttttgttggggaccagcctcaacaccacccattttttcttttttaaaaccaccgttgctatcatggcttgttcatggtgtctggtctctctccagaggcatcttccccatctgcagactaaaagcaaacagcataaaccgatacacattaaagtaaaatttgcaatagttgatcctccaacggtccatttaagaggattcacatttgaaagtccatcagcagctccagctaggatgtcaattccaggcaggagagtgaaatgcgcctgagatgcttcaaaaatgtgttcctttcatttggctatatccaatgttaaatttccatcccttccttccagatgatgtctaactttttcccaatgatgttcagtagcattatgtgaatggggatttacgcagaaatcagaagtatttccaatcacattacatttgcaatagatgctctaagctcattatacaatctcccatccatattaacagtctgtctaagatcattgatttgccaattttctttggtctgtttgagtctgagaattccacaattttgaggaattattttgccaattatttacatattctgcagtttgaacagaggaatgtaaagcaattccagcagcactccccttaacatttctgtgatgatatgaatgtaaggagaggcttcccatggtctattgagggaaactggtatccaaactccttctctggcccttaccagcaacacagatgttttcacacaaaacgtggaatcaatacgggtgaaaaggcaacagttttgacatttaataattttagaattaggtcatatatgaatatttctgaccatcaacatgaaaggaggcttgacacaactctgaatggatactgttctgttggaagaaaactgatacacaaattgaagtgtctcaccttctccatcaagatagtattttccttccaaactcgaatatgagattgggccatcattaacttccatagttcagggtgttcagggcctattattggattaattatttttggatgtggtccggctgtaccaaaattggtccaaattatgggaaaatgagcacacttttcagtgtaagtagtgtcatctctttgatagtatagatcctgttttagttttgtctttcatctatcattctgattggtacaattaactgcaaaagtcctcttaggggaccaatcaatgatgattccataggaattattttgcagtagcacaccatgatcagcaatgcaatctttccaaatcaatatttctaaatcctttgaccattgttgagattgttgacacctctcttttctggtcttaaattgttccagttggaccgaactctgtgaatgagccaggctccatccagaaagtaaatgataggatactggtctttgattatgacctgaagtcttaactagccaatgttgttgatagccttttaggcaaccgatagctggccctatgtaaagaggggggactgataacccatggacacatttattaacattccttcctcctctgggtgagagggcccatgagtatctgtaggctcaggcatccaaacactattattaacataaacctcaactgggggttccaacaaagtgacagacctaattaaaggcaggaatgggacatatgcccaataggtataattttggtctgctgtagtcacagggagacttaccgtcatagcaattaccgcaatcatagccacgatgaggttactcgagtttagtggtttttgttgtgccttcaggttttcttctgcaagctgggtcagcctcttgatgtgtcccaagtcagtgggctcacttgacgggttttgtttgtcttcatgtggtcagctgaaatgttcatttgagccatcaaggtgtgcttgggggttgagatcttggttccaaaatccttttctttggaattttgctcatggtagagtttaagatgttttgtaggtacccaaactggaagctggttttctcctggggaaatacaagcaaaccctcttccccatgttataactctccctctttcccaggtctttgttttaaagtccttccaccacacaggttttccttcatgaacatttatcttctgtcttgttaaatgctgctcagctgctgtagtaacctgatcctgggagatgttcaaaaaatttaaggtaacaagagccaattgtaattgcatatgaggggtggaatattccctatctccccctatctcctgtttatgtaattgcatttttaaggttcgattggctcgctcaacaatcacttgcccttgagaattataggggatacttgtactgtgtttaatgctccactacagtagcctgtccattgtctgtttttaatttttttggaattcccatgacagcaaaacaggaaaccaaacgtctttttatatgtgctgcagtctcaccagtttggcaagtagcccatataaaatgagaatatgtatctctggttacatggacataagaaagtttgccaaatgtaggaacgtgggtgatgtccatttgccagatcttgtcaggtgccaacctttgaggcttaacaccagttctttgatgtggtaattgcctggcactgaggtaagtcaaaatttggggcatcagtcagtgagggggaaaccaacaagtcagcttgctgattagccttagtcaagggtcctggaagattggtatgtgctaggacatgagttatatagaaaagaaattcccaggcatgcacaactgcttgtacagagttgaacaattgataaagctgttcatcaataatatatttaattaaggcagttttaatatgcagagtagcttacacaacataagctgaatctgaaacaatattaactggctgattaaaatcttctaatactgtaatcaccacctgtaatttagctgtttgggctgaggaaaagttagtatggataactttatcacaaggtcccacatatgccattttcccagtactgtagccatcagtaaaagtagtcacagcttcttccaaaggggcatcctgagtaatttttggaagaatccatgtagttaattttaagaactggaaagttttatttttaggataatgattatcaatacatccaacaaattccgctaaattaacttgccatgtaactgagttaataaatgcctgtttaatttgatttttattcattggaactataattttattgggctcagtgccacaaagtttaacaattcatataccagcctgtccggttaaaattgccatctgatctaaatatactgtaagtgtttttatggtattatgtggcaaaaaggaccattcaactaaatcatcattttgaataataatcaccattagggagtgcaaagtagggaagacaatgaattgtagaggcaagtctgagtcaatcctaatgacttgggcttgctgaattttttcttcaattactcttaactttttcatggcctcgggtgttagtcctcttttactgtgtaagccggaatctcccctcaatactgagaagagattagacatagcataagtagcaattcctaaggtgggccaagtacaataaatatctcctaacaatttttgaaaatcatttcaaaatgatttttatttcaaaaaggtttttaaagaattttttctaatttgaaccttttgcggcttaatggctctatcctgtacttgcatccccaaatactgaaaaggagtcattgtttgaattttgtcaggtgctataagcaatccagcgtttgtaattgccttttgtaaagatgaataacattgaataagttgttctctattttttgctgcacagagtatgtcatccatgtaatggatgatgtaacaatctggaaattgatctctaacaggctggatacctctgcccacaaaagtttgacaaactgtgtgactgtttaacatatcctgggataaaaccttccaaggatatctggctgcagattctttgttattaacagcaaggatggtaaaggaaattttttcaaaatctgcctctgctaaaggaattgtaaaaaagcagtctttttaaatctataataacaagcagcccgtctttagggatcatggtgggggatgggagcccaggttgtaaagctctcatcggttgaattacagctttgacccctcacaagtcagtcagcatgcgccatctgccggactttgtcttaattacaaatattggggaattccaaggaaagtgggtgaaacatggcctttttctagtagttctttaactatttcatgaaattcccccaactgttccttgcagagcggccactgtttgacccagacagtagtaaactgcagggcgagcctgaattgccccctccccataatgaactgcggggcaggtaataattggcacggagagccgagtctcggtgagccgagtatcgggctccctcccccaccactcactgggttgaggaggtggtggccattctgggcattcctctggagaagccgtgggctgaacaactttctgagtaggtttagggaaactggaggggattggcataaatcacctctggactctccttttggctagtacttggtagaggcggttcagagttctgattatcaaactcctctctctcctcctctgactcagcctcatcgtctgtctgaaaaggctccagtgctgcacgcaccaatgaccaaactgaccaaacaggaaaaggaatttcctttccttctccctttgttcttttaaggtcctttccaactctttcccagtctttcaattccaaagttccctctttaggcaaccaaggacaaaactgttccacagcatgaaacaaatccgtaagattttccttatcaacttttaccccactatgcttcaagcgttgctgtagcaagctcaaatacgtggcgtacttatattcagtttgtcccatttgtgtccctggctttctctgagtgcctcgcttacctgcagagcttaaaaactttttcatcctcaggagtcctccatccgtcggccctccgtttcacacgcttgagcgttcctttaccagattctctcgggccccatggttgggtgccaagctgttggggaccagcctcaacaccacccttagggtactcaaagtccaatggtgacaaaggaatgagaagagacaagttaagagtgcataaaggtgggggccacggggccagattcaaggtaggagcctgcaaaaggccctgatctctggtctccacactattgtgtacaatcacttagatctgagaagcagatgttgaggggtgaaacgatgaaagggaggtgatgtgtcatacacctaatctatagcagtggcggtttaggtaaattttctttgtgctgaagcagcataaactttactactgatttattctttaacttatcagagagcagctgtggggagtgggcttaactaggagccagcaagtctggccacattccattgcttcaaaggagtgtctttctccttgaacacaatgtttacagataagagagcaggtcttgctcagagcatgcgaacattatggcaattaggaggctttcctcctcagaggcctcttgtggctttctgcaacttattgtcccatatttttatggccagtttatacaggcaccccgtaagccctttccccaacagttttctctatgttttttaatgtttataccattttttactagcttaaaatagaaaaatgttgatgaactaaatgttgatgaacagttgatacatttcattgttccatacatgctgaaatggacacaaacaaaaatggcgatttttaagaagttgttgaaaaactcacttgtggacaactgttatataagttaatttaatcgtgtgtatatgtatgtctacatgagtgcatggatgagcaagcccatggctcttatgaaacactcatcataatttaatcaataagttttatatttaacacttgaaattatctctacagtagtttccatggccttaaatttttcctacactgtcacactgagttaaacaatagtaagcatagtgctgtagtatgtgtttgcatgtgtgtatacataatgtgtgcatatataatcaatatataataccctttcatgaagttccatgttgttatccttgaactcatttcacgttttcccaggcaaccctctcttgattaatttttttttttttttgagacagagtctcgctctgttgcccaggctggagtgcagtagaacagttttggctcactgcaacctctgcctcctgggttcaagtgattcttctgcctcagcctcccaaatagctgggattataggtgcatgacaccacacctggttaatttttgtatttttagttgagacggggttttgccatgttggccaggttggtctcgaactcttgacctcaagtgatctgctggcctcagcctcccaaaatgctgactgtgattacaggcatgaaccaccacacctcaatttacttttgtagatcatatctgttagtaacttgttgagcccgggaggtggaggttgtggtgagctgagatcgcaccactgcactccagcctgggcaacaagagcaaagcactatctcaaaaaaaataaaataaaataaaataaataaaaaatttagctgagcgtggtggcacaaacctgtagtcccacctgcttgggaggcggaggtgggaagatcacttgagggcagtcagttgagatggcagtgagcatgatcaaaccactgcattccagcctgtgggaaacagagtgagaccccagctcttaaaaaagaaaaaaaaagaaagaaagaaaacaaactacaaaatgctgacgaaagaaatcaaaggcactcaaatggagacatatacaatgtcaatttattggaagactcagcatagaaacaatgtgaaattaaccaaattgatatacaacattaatacatttcctatcaaggtgttttgtggatactaacaagattatccaaaaaattatgtagaaaggcaaaaaaagatagaatgcctaaaacatctgggaaaaaaaataaaaaggttggaatcatttcatgtgatttcaagtcttctaatatagtataagtatttccttctttttttcatatttacaataaacctagtttatacctgccgtgatcttatgtgcatactcatgcatattttttttctccaaataacagcttcatttatgtgccccctaaacttttcactatagtaacaaagggaagaaatgcatgaaacatagaatgtagactgcaacatatggaaaaggaaactttttaaaattgtgtacaaaaacaaaaaataattttattacaattaaagaaccagagaacattttgcttaataccataatcaaaaatgacatttctgtagcttttggaaaaatgctcttctagtagagtcctatttattatatataacaattagataatgataaattatattatgtaaataaacacttcacaataattttcactgaactgatatgaaaaatatcttaggcaattttactaaacagtatttcacaagcattttcaacagtcatattgtgcaatgggacctatgtgtccagccacaagaggaatgtaataagctattaccatgaagaaaattgaagtctctcctaaccaagtctggagtttcaagagtaaacattcagtgttatcctaaagagttagacttcattttgtgatgtctgagtaatgtgatggttaatattaggtgtcaacttgagtgagttgaaggatatctagatggctgataaagtattgtttctgggtgtgtctgtgagggtgttgccgaggagattgacatttgagtcagtggactaggagaggaagacccaccctcagtgtgagtgggcaccatccgattggctgccagtgtggctagaacaaagcaggtggaagaaggtgggataaccttgcttgctgagtcttctggttctctttcttcttcccatgctggatgcttgtttatgcttctcctgcccttggacatcagattataggttcttcagcctttggactctgggacttgaaccagcagcttcctgggatatctcgagcctttggtcacagactgaaggttgcatcattggcttccttggttttgaggttttcagacttggactgagccactaccagcttctctcttctccagcttgcatacagcctatcatgggacctttgccttgtaattgtgtgaaccaattctccctaataaactcccttttatatatacatgtatcccatttgttctgtacctatagagaaccctgactaatacagactttggtacctggagtggtttttttttgtttttttttttttgacagggtctcactcttttgcccaggctggagtgcagtggtgcaatcttggctcactgcaacctccacctctgaggttcaagccatcctcctgcctcagctccccaggcagctgggactacaggtgtgcaccaccatacctggctaatttttgcattttttgtatgatgtggttttgccatgcttcccaggctgatctcgaactcccgagctcaagtaatccacctgccttggcctcccaaagtactgggaatacaggtgtgagccactgtgtccagcctagaggaacaaaattttaaggatgaatttccttagttggtttaggggcttctggagttggctctctaatcttattacaactaaaaatgctaaggtctctacttctaatagtacagagaacactgatagtccttggtatgcattgttcagagacttgtgcaaaataaatgtatttgatactcatgattcagtgctcctgagaggcaaggagtttagtgactttatacatgatacttttcaacatttctggagaaccaaagaacataatgaagttgctttcctaagttccctggtaaaaaatgatgaaagaaatggataagctcagagatgatacctcccagatctagaatatatcatacttagcctcaaagcttctaagggtaccctgggtgcgactgttttgtagacaaaaggctgaaattgccaaaaatcagacacaagctcttatgtgagtggatgacctacaataattggtgcacactcagcctcaccaggtatctataaagtaagggcattgattgggaaagattgggagcatgtaacttgacatggggatgtgtgggaggatcctgatgaagctgggaacactgagctcttaaaccctgatgagccctttttgcgagagaaaatggcctccctacccctcatggtggcaacatcttcttccccaccaaggctgctttcagcctttgtaccttttttctgaggacattcaccatgcattgcctgaggaaacaacaatggcctcctctgaggcagatgcgaggcaaggcaatgctgattcttctcaggatcctcccccaccacccttctttgcctctagacctgtaactagactcaagtcccagtggctgctagaggtgatgtgacccgtgaggaggtgcgctgcactccaaaagaactgctgaggcataattatgacattattgtctatatttggagattatgatttaaggagatgtgtatgggtgccaagttgatgaggggtagacttgtggttaatcttggttgtcagtttgattggattgagggatgcctagatggttcataaagtattgtttctggatatgtcagtgagtgtattgctaaaggagattgacattggagtcagtaaactgggagaggaaggcccaccctcagtgtgggtgggcaccatccagttgactgccagacggctagaacaaaacaggcaaaaggtagaataaattgacttgctgggtcttctggctctttcttctttctatgctggacgcttgcttacactcctcctgcccttggaaatcagactccaggttctttggccttcggactctgaggcttgcactagtggcttcccaagggcttccaggcttttagccatagactgaaagcctaatatggattggatctatgtccctatccaaaactcatgttgaactgtaatccccagtgctgaaagtggggcctggtgggaggtgatttgatcatggagggcatttcatgtggtttgacaccatcttcctctttgtgctaccattgcaatagtgagttcttgtgagatctggttgtttaaacatgtgtggcacctacccccacccacttcctcctgttctggccatgtgaagtgcctgctcttacttcaccttccttcatgattttaagtttcctaaggcctccctagaagtcagagagatgctggcattatgcttccggcacaccctgcagaactgtgagccaattaaacctcttttctttataaattacccagtgttagatatttctttatagcaatgtgagaatggactaatacaaggctgtaatactgttggcttccctggttcagagacttttggattttaactgagcgactaccagcttttctcttccctggtttgcagagagcctattgtggaacttaactttacaattgtatgagccggttctccctaataaactcccttttatatatacacagatcctattagttctgtttctctgtagaaccctaatacaattactaacacattttacacctctgcactccctctttgtattctgcccatcttgtcaagctgataataaagcctgagtgccccctccttttgcaccagctggaagttcaaaccacaagtgggtactccaaccccagccctatcctttaacaatcatggtaccccaagccagtcatctattccagttctctgaagctgcatttgaaccagctagagaagtctaccctgctttctccataaagcctcattatgtaataaacattttcaggccatttgagtgtatggcatcatcattatcaatatccaaaccaaacctcaggtagactttagacaagttccagtacagtgggcaaaagttaaaattaccaaaaaaaaggtatgaaggtgaatatatgaaatttctagtcagtctgccaaaagaaaacaatactcattttgtgtgttcattcttgagaaaatgtatgaagattagtattttcagattaatgtcactaatacgaaaaagacattattacagtatttttacccttaacctcatacctttttacatcttatttttcatattactatattggtatacttcatataaatgaaagtgcatgccatgggtcttatttggcatacacacaaaaaggcacatagaaatataataatatggtggccaggcacagtgactcatgcctgtattcccagcactttgggaggctaaggcgggtagatcacctgaggccatgagttcgagaccagcctgcccaacatggtgagaaccctaatggtgcattattattgtctgctataaagtatcttcctgtggtgggataaaacagtgttggtagacataacatgattcattcatacttaagaaaatttaaactttattacataaaacatgagaactatgcacattctaaatcaaagttgcacattatattaccaacagttaaatgtgaattctattcaagaacatgctatattggcagttttcattaaactctctactctgatataactgttctctcttccatttcaaaaataagactatagttcatcaatttttgctaaacaacagctattgctattcagttgaggaggtggccatcatttcccctggatgatttctatggcataatcagtccctaagaacccattactcttttccataaaaatcctattttcctaaggccatggcatgctctattttgaggttatttggtagagcatagaagcactaagccattctgtaaggaaaaggatacattgaacacaataagtataatgactggcatcatagttttacattattctctgctcacctccatgccatgaaaagatttcaaagttcaggctaaagtcataaagagtaaagaagccttttcaaaaaacctcccaaataattttttaaaaaattataagctgaatataactgatcatttccacatgccgttgaacctttggtacacatcatgtcatgaggataaacatattttgttgtataatatttcttcagcatgcaatgtcatacattaatataagagaaccagagactgagttatttcttgcataagtcttctgatgtactctagtaatattccttgagttatagcctcagcatacaaaatctatctgtgaggtattttcaaagatatatcttttgatgtctagtgatgtggcaggcctcgacaaagcctgtgtcttgtacactacatttacatggtttctctttactatggactctgatgttgattaacgctcatgatgaaaagtttgccatactcggtttgtaatgactgtctcatgaattaattatctgatgcggtgtaagttgtgatttgtgactaaagaccttaccacatacatggcatttgtaatgtttctcttcagtatggattctgtgatgatatgcaagatgtgaaatctgagtgaagaccttaccacactcattatatttgtaaggtttctctccagaatggactctgtaataacttgtaaggtggaacttttgtctaaaaacctagtctcactcactacatttttaaggtttctgtgcattatggattattttatgaaaggcaaggcttgaatgcacactaaatgcttagctatattaattacatttgtaagatttctctccagtatgaactatctgatgttttgcaaggtgtgaaatttgattaaaggctctgccacattcgttacatttatgtctctctccagtatgaattctctgatgaattgttaaggagaacttgttcctgaagtccttatcacattccttacatgtataaggtttccttccaatgtggattaacagatgggcagtgaggcttgaatgcccaccaaattctttggcacatttattgcatttgtaaagtttctctcctgtatgaattctccaacattgtgctaggtatgaatagctactatagaccttgccacattcattacatctataaggtttctcttccatatgaattatccagtgttctgtaaagtgtgaattgtgactaaagatcttaccacattcattacttttgtaaggtttctctccagtatgagttctccaatgtcgtgcaaggtgtgcaatttgattgaagaccttgccacattcattacatttgtaaggcctctctccagtatgaattctctgatgattgcttagggataaactatgcctgaagaccttgccacgttcatgacatttgtaaggtttctttccactatgaattagaagatgggcaataaggcctgaatagtcactaaatgctttgccacattcaatatatttgtaacacttctctccagtatgaattcttcgatgtcatacaaggtatgaaagttgactaaaaactttgccacattcattacatttgtaaggcttttctctggtatgaattatccaatgttctataaagtgtgaactgtgagtaaagaccttgtaacattcattacatttgtaaggtttctctccagtaagaaataactcagtctcgggctaaaaactttgccacattcattacatttgtaaggcttctctccagtatgaattatccaatgttctgcaaggtgtgaactctgagtaaagaccttgtaacattcattacatttgtaaggtttctctccagtatgaattctctgatgtcatgcaaggtatgaattattcctgaagactttaccacactcattacatttgtaaggtttctctccagtatgaattctctgatgattgataagggataactcatacctgaagactttgccaaatttttttacatttgtaaggttctctccagtatgaattacaagatgggcagtgaggtctaaccactcgttaaatattttgccacattcattatgtttctgagactttctccagtatgaattcttcgatgttgtgcaaggtttgaattgcaactaaagaacttgccgcattcattacatttgtaaggtttctgtcctgtattcactcactaatactctgtaaggtgtgaattgcgactaaagactttgccacattccatacatttgtaaggtttctctccagtatgaattctcagatgttctgcaagatgtgaattgcgattaaagaccttgcacattcattacgtttgtaagatttctctcctatatgaattctgtgatgttgtacaatgtatgaatttttcctaaagactttaccacactcattacatttgtaaagtttatctggatccaggattatgtcatggttaccaaggcttgaagacactctaaagactttgccatgctcattacattcataagatttttccctaatgtgtgttttctgttcttgtgggagcaatggagaatcaaaaaaatcaccacttacatttattaacgtgagttttcacaccagaagaaattttttctttcttttctttctttcttttttttttttttttgagacagagtctttctctgtcgcccaggctggagtgcagtggagtgcagtgatctctgctcactgcaacctccacctcctgggttcaagcagttctcctgcctcagcctcctgagtagctgagattacaggcgccagccaccacgcccagctaatttttttgtatttttagtagagacggggtttcaccatgttggtcaggctggtctcgaacctctgatctcatgatccacccgcctcggcatctcaaagtgctgggattataggcgtgagccaccgcgcctggctgagtgcagccaattaatatcccctaatagctgttgaaaataatttgaagtctgtaacctgtctttacagagaactactttctgaggctgtacacttctttcagtaacaatagtgcctgcgtaatggtatggggaaattgtaccttttctggagctattttgagattccatttagttaaagcctgctttgttcctcggaataactcatgtgagatttgatctgtaggagcgaccaaaagaatgtcatccatataatgaatgatgtaagcagtaggaaacatattccaaggctcctttcatgcccttcctacaaaatgctgacatagtgtaggactgttaagtatgccttgaggtaaaactttccattgatagcgagaaacaggttctctttgattaatagaaggcacagagaaagcaaattgaggcttatccttcttatgtaagggtatagtaaaaaaaaaaaacaatccttaagatctattactacaagaggccagtatcttggaatggctgctggggctggcagaccttgctgtaatgcacccattggtttaatttgtgcattaacagctctcaaatcatgccacagtcaccatcttccgggcttttttgagataacaaacactggtgaattccagctgacatcactatatgtcctgcatccaattgctcttttactagctgctgaagttgagtttgtttctcctgtgttaggggccattgatcgacccatacaggtgttttgctgagccattctaatggtaaggcagttggcagaggagaaatatcaatgacccccatcagaaatcctgatgtcctagcccttttctatctgtttttccagtttctcatatcgggttaggagttccttgtaggaatttccctaaacttttcccactctgatatcccatattcttcaacattttaaatcctgggttatcaaattttcacttgtaagtctgctatcccatgccgtaagtctcagccccataaattgatagctatatttgcaacatagagctgaaaagtatatgactgtccacccagaccaagacaaagtaaaatctcagcactctgtcaaacactttgaactgctcctactcccactagggatgtggaggttagtctgagaggccatggtaggggccggtccttactggttattactgacacatcagctcctgtgtccattagcccataaaatttcttttctttaatttgtattacacaggtaggtctattagagtttatgggttgggatagatttcccatgtagttgtgctcccaaaccctttgttccctcatttctcttttcatggagaagggtgtaatttgcagagaataagcaacaattgagcaatatattctcctggttcaaaaacctgaagatcttgtgacattaaaactacttgaatttctccttcataattggagtcaactactccagggactacagtgatgcctcacaagttaagatggctcttgcccaaaattagtcccatgtatcctgctggtaaaggtctctaaatgccagggggagctttggtaggtttgtctcctccaactaatataattctttctctggcagggagatcttatcctggacttcctggtgttcctggggtgagggaatcaatgtttcttctgggacccacccctgaagtgtggttgtggtctgaaatatgaatgcccttattgtttgaggggcctgggtccaggcccccttctcatttcctgatgggggtacgattctgatgaaattttgagtggcactgattagcccagtgattttctttgttacagtgaggacagagtcctggcattttttcctggtagtagtggggaaccgcattgtaaggtcctttctctcttgagatctcactgcattcctttttaaaatgtccagttatttccacagttataacattttcccattttagggttttttttttttttccattttagggtttgaccattggctctttttagacttatcaactgccaaattagccatttcttgtgctaacattgtggagcaatgcagctcaattcccacatcttgacaagctctgagaaaatttcccaagtttttgtacatttcacaggtgccagtgcatgtttacaatctgcatttgcattctgaaaagctagggttaaggttaacatttctgcagcagtggtgtgaggaatctgacacttgactgcctcttgagatcctgcaagaaattgtgcataaggttcctgagacccttgcacaatatttaaaaaggattgtactgggactccctcttctgtaattgtggcccaggcatgtttagtggccagtgcacactgctgataagcagcgtctgggagtgccatttgatgttccaggtctgaataagggccatgacctaacagcatatcctctgtagtgtctctgtgtccagcagcacggttctgtctagcttggtctgcacacatttcttgccaatttaaattccatgtcaggtatacactagcagacaaacaagtgcaagccaaatgctttacatcaaagggtagaaggtgcatagcaccaaatacagattctagcaatcctaaagtgaatgggctctgtattccattattaagtacactagctcttaattccttcaacaacttaaactctagtggggtgtgttgatgaataagctgctgtgggctatttgtatcgggccttatggagataggaaaagcacagggtcctaagagctctccagctatggcagcagagcataaaattctctctattggggtttctatttctgctaccgaaggaggcggtacagatgtttctgcaattggagggggcggtacaggccaatttttatactccctctcctgttttttattttcaactggtgctgtgggtgggacaacagattctttcagatttttagactcagaacatgactccttctgtccagcagaataagaaggagataatggcagaaggacagtatgaacaaaactccaagtggagaaaacagatgatcaactttaaggcctgcttgatgagcccattttattttattttattttttatttattttttgagacggagtcttgctctgtctcccaggctggagtgcagtggcatgatctcagctcactgcaacctctgcctcccgggttcaagcaattctcctgcttcagcctcccatgtagctgggactacaggtgccggccaccagtcaaggctaatttttgtatttttagtagagacagggcttcaccatatttttcaggctggtctcgaactcccgacctcaggtgatctgcccgcctcagcctcccaaagtgctgggattacaggcatgagccaccgcgcccggctattgatgagcccattttaatccttctcctgctctgtcccaatttttcaaatcaagagtgcctgtctgtggaaaccatgggttatgcatggtaatctcatgcagaagcttagttaatgtctgacaactaacctgagccacagattgtttaagtaaaacttcaagcaacttcacataaagtttttcttcaataaacaaattgtgccccatgttaacctgattcagaaatttctctttcccaaggccgggcgcagtggctcacgcctgtaatcccagcactttgggaggccgaggcgggcagatcatgaggtcaggagatcaagaccatcctggctaatgcggtgaaaccccatctctactaaaaatagcaaaaattagacgggtgtggtggcgggcgcccgaagtcccacctacttgggaggctgaggcaggagaatggtgagaacctgagagtcagagcttgcagtgagcggagattgtgccattgcactccagcctgggagactgggagacagagcgagactccatctcaaaaaaaaaaaaaaaaaaaaggaaaaaagaaacttctcgttcccagtacttttttgaagcactgaccatagagattccattatggttttgacattttgggaaaccagttttaccattgtgtcagtaaaacagtaagatagtttgagagcatatgatctaaataaagatatttgaagggttagttggaattctaaaagtaggtaatggccaaatagcattctcattccttaccagacaaaaacttctttgtcaaaggaattagaaaatgtgaaaatattttttccagataaagctcatatgccacttccaattgactaatgaaatataatagacagactgaaaaagtggattatgatttttttatctgtattcatttatttatttattgacgcagtctcgctctgtctcccaggctggattgcagtggcacaatcttggctcactgcaagctccgcctcccgggttcatgccattctcctgcctcagcctcccgagtagctgggactacaggtgcctgccaccatgcccggcaaattttttgtatttttagtagagacggggtttcaccgtgttagccaggatggtcttgatctgacctcgtgatccacctgcttcggcctaccaaagtgctgggattacaggcgtgagccaccgtgcccagtcgattatgaatcttaaaatgcttcctgtaaatattatgtagctaaagattgatttccagcatctgacataatggtaggtttcttgttaaccagtttctcttctttctgggtaattgcaagtgaatatgtgcacatactgaccgaaataaaatcagggcctgaacttagttgtttactgaaaattcctgggcaaatagtccataaaagctgtttatctctgaatgcactatggctggttaaatacagagaacatccttcttccagctgtaaaggatgaagcatattaaacattacccaggcagatgaagctaaataaccatacagcagctctgtctgacaatgttgtgctggatattgcagtttacttttcaaggtgcagatgtaaggatttaaaaaaaaaaaaaaatttttggccgggcacagtggctcatgcctataatcccagcactttaagaggccgaggcaggtggatcacaaggtcaggagttcaagacgagcgtggccaagatggtgaaaccccgtctctaccaaaaataacaaaaattagccgggcatggtggcacttgcctataatcccagctactcgggtggctgaggcagagagttgcttgaacctgggaggcagaggttgcaatgagccgtgatcacgccaccgcaccccagtctgggtgacagagtgagactccatctcaaaagataataataataataataataataataataataataataataataatttggcaccaaataaatatgagtagcatcctttggcctatgaaatagagtcaggatttgcagggaattgagtttgagaaatgaatgaataaaggcaccgtggtgcctgaccccctcattcatgtgtgtgactctgagcactcacaggcatgtccagcaactcagcccagggcaggtgggttagcctggggttataccttgaaccttatattactctcagtacctctttagggcactgaccttatatcggctgcggcagactcctcctggtgtccccattcatctgatcaatttcacttcttctgctccagcagaccttcttccttcatgtcctcctatccctgtgtatgggtgccatgttgccgtggaccctgttggactgaacaaaggagaaggaacgcgggaattaaagacaaaagaatatgtttggaagaagtggtcaggggactccttgcttctggtgaacaagggccctgagcatctagcacctttcacattggataagattagttgtgacatgttgacttctgtgtatataatataataattaaaacttgtttcaaattatacatatgagattgagaattttaaacttcctatttataagacatgtacaatctataaatcttggcatcagaggttagcttccacttgtaatccctattcagcccaaggacagtgacttatgcagttgtgtgtcactctcttcccttttcccagagtcgggtaggaaatggggaagtgaagtgggagaaaaaaatcactttctgttattacataatactttaaattaaattaattctttaagacaggcctgctctatctcccaggctggagtgcagtggtgtaacttcctctaactgcagccttgacctgctaggctcaagcaatcctcctacttcagcctcccgagtagctgggaccacaggtgtgaaccaccaagaccagctaggttttgtattctttttgtagaaatggggtttcactatgtttcccaggctggtctcaaaatcctgggctcaaaggatcctcctgccttggcctccaaaattactggtattacagggatgagccaccacatctggcctacatagaacttttttttgagagagagttttgctcttgttgtccaggctggagtgcaatggtatgatctcagctcgccacaacctctgtttcccagcttcaagcaattccactgcctcagcctccggagtagctgggattacaggcatgcaccacaacgcccggctaattttgtgtctttagtagagacggggtttcttcatgttggtctagactggtctctaattcccgacctcaggtgatctccccacctgggcctcccaaagtgctgggattacaggcgtaagccaccacgcccagcccatagtagattttaaaatggacatcaggacgcggtggctcacgccagtaatcctagcactttgggaggccgaggtacgtggatcacgaggtcaggggttcgagaccagcgtggccaacacagtgaaaccccatctctactaaaaaaatacaaaacttagccgggcgtggtggcagacgcctgtaatcccacctactcgggaggctgaggcaggacagttgcttgaacctgggaggcacaggttgcagtgagccaaggttgcgccactgcacaccagcctgggcaacagagctagactgcattgaaaaaaaaattttaaaaaaggaacatcaaagccgggcgtagtggctcatgcctgtaatcccagcacttagggagcaaatcactgaaggtcaggagttcaagaccagcctggcctatatggtaaaaccctgtctctaccaaaagtacaaaaattagcggggtgtggtggtacatgcctctaatttcagctacttcggaggctgaggcaggagaattacttggacctggctgggaggcagaggttgcagtgagccatgatggcactaccacactgcagcctgggtgacagagtgagactctgtctcccaaaaaaaaaaaaaaaaaaatagccaaggatggtggcatgcatctgtagtcccatctacttgggaggctgaggcaggagaatcatgccactacattccagcctgagtgatagagtgtgacttggtctcaaaaaacagaaaaagaaatagcaatcagctctttaatgtctccctttatatgagcagtagtcctggccgtgcgcggtggctcacacttgtaatcccagcactttggaaggctgatgcaggcaaatcacctgaagttggtggttcgagaccagcctgaccaacatggagaaaccctgtctctactaaaactacaaaattagctgggtgtggtggcgcatgcctgtaatcccagcaactcaggaggctgaggcaggagaattgcttgaacccgggaagcaaaggttgtggtgagccaagatcacgccattgcactccagcctcggcaacaagagggaaactccgtctcaaaaaatacgtaaataaataataaaaataaaagcacgagtcctattcacgtgtagtcaacacgcatgaccaaattctctcacaggcaccatctgcaggaacatcctattggacaataagaactctgaacatcccttttggccaatataaacattcagaccagggagcctgcatcaggtttttgatgtttttattgtgcagtttgttttatacaatgttttctgtgatctcagtttataaattttcccagtacacattctatgttttatattttacgcacagttaactaggtaactaagggcaatgcatatatataaaattgctctattgcctggtgttatgtaactgtacttgtgacatcataattgcaccctccgacactgttagtcagttcttattgcttttaatgctgtgtattcacttgaactcatatgaagggggtggcctgcccctccacacttgtgggcgtttctcatcaggtggaacgagagacttgagaaaataaagagacacagagacaaagtatagagaaagaaaagcgggcccagggaaccgacgctcagcatacggaggacccacgctggctccagtctctgagtccccttagtatttattaatcattattgggcgtttctcagagaggggaatgtggcaggacaatagggtaatagtagagaggtcagcaggaaaacttgtgaacaaatgtctctgcatcataaacaaggtaaaggaaaaagtgctgtgcttttgatgtgcatatacataaacacctcaatgccttaaagagcagtattgctgccagcatgtctcacctccagccctaaggcggttttcccctatctcagtagatggtatatacaattgggctttacacccagacattcctttgccagggacgagtgggagacagatgccttcctcttatctcaactgcaaagaggccttccttcctctttcactaatcctcctcagcacagaccctttacgggtgtcgggctaggggatggtcaggtctttcccttcccacgaggccatatttcagaatatcacatgggggagaaactttggacaatacctggctttcctaggcagaggtccctgcagacttccacagtgtattgtgtctctgggtgtcaggcctctgagcccaagctaagccatcgtataccctgtgacctgcacatacacatccagatggccggttcctgccttaactgatgacattccaccacaaaagaagtgaaaatggcctgttcctgccttaactgatgacattgtcttgtgaaattccttctcctggctcatcctggctcaaaagctcccccactgagtaccttgtgacccccactctgcccgccagagaacaacccccctttgactgtaattttcctttacctacccaaatcctataaaacggccccacccctatctcccttcactgactctctttttggactcagcccgcctgcacccaggtgaaataaacagccatgttgctccaacaaagcctgtttggtggtctcttcacaaaatttcatgcgcatccatgtgaagagaccaccaaacagactttgtgtgagcaacatggctgtttatttcacctgggtgcaggcgggctgagtccaaaaagagagtcggactttgaatggaaggcgagtctggtttcctaagcagttcctagcttgacttttcccttttgtgtagtgatctggtggccccaaatttattttcctttcacacagcccaaccctcacaccacctctggtctatcttgcttgttctgtgtgattacttttgtgcttttgtcatccactctggatcctagtaagaacaaggccccaaggggagggcggagccagaacgtggggctgtgctgggctcgccccctctgagtggagctcaaccctggcttcacattagagtgcagagcattttgcaaatagagcttttgtgccgctttagcagggattcttattctgatgggatggaacccaccctcagtaatacctgcagtggcgcaggtgcttgtcatctgtgcgcagcattgagcatcgaagctctgtgtcctccatttctgagggctgagctcagcctgtgatccacagagagttgaggggctgtcctgtagggaaaggaaagagagatcagactgttactgtgtctacgtagaaagaagtagacataagagacttccttttgttctgtactaagaaaaattcttctgccttgagatgctgttaatctgtaaccatacccccaaccctgtgctcccagaaatgtgctgtgttgactcaaggtttaatggatttagggctatgcaggttgtgctttgttaagcaaatgcttgaaggcagtatgcttgttaaaagtcatcaccactccctattctcaagtacccggggacacaaaacactgtggaaggctgcaaggacctctgcctaggaaagccaggtattgtccaaggtttctccccatgtgacagtctgaaatatggcctcgtgggaagggaaagacccgaccatcccccagcccgacacccataaatggtctgtgctgtggaggattagtgaaagaggaaggcctctttgcagttgagataagaggaaggcatctgtctcctgctcatccctgggcaatggaatgtctccatgtaaaacccgattgtatgttctattcactgagataggagaaaacggccttagggctggaggtgagacatgcgggcagcaatactgctctttaaggcattgaggtgtttatgtatatgcacatcaaaggcacagcacttttttctttaccttgtttatgatgcagagacatttgttcacaagttttcctgctgacccttccccactattaccctattgttctgccacatccccctctctgagatggtagagatagtgatcaataaatactgagggaactcagagaccagtgccgtcgtgggtcctccgtatgctgagcgccggtcccctgggcccactgttctttctctatactttgtctctttcttttgtcaagagatggcaaaagtgaaaaacaaaacacagaaaaaagtaagaaagcaggaggacaaaaggaactggagaaatgtagagaaaagctagatatacagagacatgaaggacggcaaggtagggagagtggcagcgaagagggaggctcatcagagtgagggagagagggaaggatttggagccagggcagacagagcagagtggtgcttgtgtcaaggagaacagagggagaaacacagcagggaggacacctggggatctggggtgccacagggtcgggacacgggagtgtatcagggaagagagaatttaacagggagaacagaggaggcacagagatgggagaagaggcagaaatagacagagattgaggatgattgaaatattggggagaaggagcaataagaggttaaataagttgtgaggatggagcagaagaggtggaagagaaggaatagagagggaagaaagggataaacggcagaagaggagaggggcacaaaatgaagagcagaatcccaggaagaaagaaaagaaaacaagagctagagagagaaggggagaatgagagagatatacagaattagggagggaagtgcagtaatgaagacagaggggctgggtgcagtggctcaagtctgtaatctccacacttcaggagaatgaggcaagtggattgcttgagtccaggatttcgagaccagcctgggcaacatagtgagaacaccatctctgccaaaaaaaaaataataataataagtaaataaacctgtactcccagctgctctggtggccaagctgggaggatgacttgagcccaggaggtccaggctgcactgagctgagatcatgccactatactgcagcctggtcaacagggcgagagactttgggtttagatgagtgggtgagttcattggatatgattagttgtgacatgttgacttccatgtatataatctaataactaaaaacttgtttatacacatcagattgagaattttaaaattggtgtctataagacgtacattctataaatcttggcatcagaggttatgttccacttggattccctattcagccagagggaagtgacttattcagttgtgaatcactgtcttcccttttcctaggatgaggagggcaaggggtagtgaagtgggaaaaaagtcaccgtctgttattacataatacttttaattaaataatattttgagacagggtacggctctatcacccaggctggagtgcagtgcgtgatctcctctaactgcagccttgacctcttgggctcaagcgatcctcctacctcagccttctgagtagctgggaccacagccatgagccaccaagcccggctagttttcgtatttttttctttttgtagaaacttggtttcactatgtttcccaggctggtctcaaaatcctgggctgaaaggatcctcctgccttggcctcccaaattactgggattacagattacagggatggcccgtggcatctggcctacatagcccccccccctttttttttttgagagggagttttactcttgttgcccaggctggagtgcgatggcatgatgtcagctcaccacaaactccgcttgtcggcttcaagcaattctactgcctcagcctcagtagctgggattacaggcttgcaccaccccacccagctaattttgtgtttttagtagagacgaggtttcatcatgttggtccaggctggtctctaactcccatcctcaagtgatccgctgcctgggcctcccaaagtgctgggattacaggcatgagccaccatgcccagcccatagtagtttttaaaagggacattaggctgcggtggctcacacctgtaatcccagcactttgggagacagaggtgggtggatcacgaggtcaggagttcgagacaagcctggccaacacagtgaaactcaatctctactaaaaaaataccaaaatttccatcctggctaacacggtgaaacccagtctctactaaaaaatacaaaaaattagccgggcgtggtggcgggctcctgtagtcccagctactcaggaggctgaggcaggagaatggcgtgaacccggtaggcggagcttgcagtgagccgagattgcgccactgcactccagcctgggcgacagagcaagactccatctcaaaacaaacaaacaaaaataccaaaattagccaggcgtggtggcagactcctgtaatcccagctactcgggaggctgaggcaggaaaattgcttgaacccaggaggcagaggttgcagtgagccgagattgcgtcactgcacaccagcctgggtaacagatttagacgccgtctgaaaaaaaaaaaaatgaagaaaaagtaaggaatatcaaagctgggcatggtggctcatgcctgtaatcccagcactttgggagcaaatcactgaaggtcatgagttggagactacctgcctggcctacatggtgaaaccccgtctctaccaaaaatacaaaaattagctggccatgtttacacacgcctctaatttcagctactccagaggctgaggcaggagaattacttggacccggctggaaggcagaggttgcagtgagccacgatcgcaccactgccctccagcctgggtgacagagtgagactccgtctgccccccctaaaaaaagaaaaagtagccgagggtggtggcatgcgtctgtagtcccatctactccggaggctgaggcaggagaatctctttaggcaggagaatcatgccacaatagtgcagcctgagtgacagagcatgacttggtctcaaaaaacaaaaaaagaaatagcaatcaactctttgtctccctttataaaagcagtagtcctggccatgtgctgtggctcacacttgtaacgccagcactttggaaggctgatgcgggcgaatcacctgacgtcgggggttggagatcagcctgaccaatatagagaaacctcgtctctataaaactacaaaattagctgggtgtggtggcgcatgcctgtaatcccagctactctggaggctgaggcaggctaattgcttgaacctgggaggcaaaggttgcggtgagccaaggtcacgccattgcactccagcctgggcaacaagagggatactccgtctcaaaaattaaataaataaataaataataaaaataaaagcactgctcctattcacgtatagtcaacacccatggagaaattcttcttttttttttttctcactgtgttgcccagcctgaagtgtagtggtgcgatcttggctcactgcaagctctgcctcccgggttcacgccattctcctgcctcagcctcccgagtagctgggactacaggcgcccgccaccaatcccggctaatttttttgtacttttagtagagatggggtttcaccttggtagccaggatgatctctatctcctgacctcgtgatctgcccgcctcggcctcccaaagtgctgggattacaggcgtgagccaccacgcccagccacccatgaccaaattctctcacagacaccatctgcagaaacatcctattggacaataagaactctgaacatcccttttggccaatataaacattcagaccagggagcctgcatcaggtttttgatgtttttattgtgcaatttgttttatacaatgttttctgtgatctcagtttataaattttcccagtacacattctatgtcttatattttacgcacagttcactagataactaagggcaatacatatatataaaattgctctattgcctggtgttatgtaactgtacctgtgacatcacaattgcaccctctgacactgttagtcagttcttattccttttaatactgtgtatttacttgaacgcatacatcagaaggtactgatcttaacatgtatttcagttcttacagtgtgtgctgattttaagtagaagttgtggcttttttcttgagagagaattgtttagaattctgcaggctgtataaatgtacttatttgcttgctggttttatcatgggttagaatagtttactgattaatatttaagatttcacatatggcttttcagtatatgatatgtaatggaactgacacactgcactagttaaattcagtaagtccctgttctgcatggatataggtaattttaagacaggtattcagaaaaaaattgtattaacatttttttttttttttgagacggagtcttgctctgtcacccaggctggagtgcagtggcacaatctgggctcactgcaatctccgcctcccaggttcaagggattcttgtgcctcagcctcccgagtagctgggactacaggtgaccgccaccacgcctggctgatttttggaatcttttcttatcttctctgtgctatgattatttgacaatacagaatttccattgattttggttactcttacataagcttcttgtggattatttaccaatatagtatattgtatggtcttttagcatttatttgtatacagtagatattctgtaactatgaagaatatatacttttcttctcattgatgtgacagtgatatgtttttttgcaaactgatagaatttagggtcacagtggaaaaacactcctgactttaggcttacacatgtttgtgccctgtcagagttttgtcatgacattggatacaggcttccatagaaatgatttgaaggacatgtaatcgccctttatttatattaaagaatcttactccttttgtattcctaaactttgaagatcatgtttggaaagtttaaaataagtatttttttgtgtgtcatatttacacatttcagtatgatttaccatctggacttaattggaaacgtattggtgtttatattttgtagatatctcttccaaatgcatgatgaaaaaggtgggaagattacttgagccagggagttgaaggctgcagtgagccctgtttttgccaccacactccagcttgggtgagtgagctacaccctatcgcaaataagtcaataaatgagaggtttaattcctcctttgaaaataaagaaagagattttctttcctttcatcccttttcttaggacatttatttagaaaatatgcaaaaatacgaaagttagctgggcatggtcgtgtgcgcttgtaataccagatactccaaaggctgaggcagaagaatagcttccacccagtaggcagaggctgcagtgagccacgatctcgcaactgcaccccagcatgggccacagagaaatactgtcttaaaaataaaataaaagaaaaaagtaaaaaaagaaaaagtaatagatctctttaacaaacgtactgggacaactaactggatatccacatggaaaagaataatgttggatccctatgttacaccatgaaaaattttatttaaaaacggtaaaacaaacaaaaaacaaggccgtgtggggtggctcacatctgtaagccaagcagtttgggaggctgaggagggcggatcacgaagtcaggagatcgagaccatcctggctaacacggtgaaaccccatctctgctaaaaatacaaaaaattagctgggcttcgtggtggtcgcctcaaatccgttactccaaaggctgaggcaggagaatggcgtgaacccggaagttggagcttgcagttagccaaaaccgtgccactgcactccagcctgggcgacagagagagattctgtctcaaaaaaaaaaaaaaaaaaaaaaaaaaaaaaaaagggagggagagacgaggaagggagccctgtgagagggggtgttactttgtcaccaggctggtctggacccccaggttcagcgattctctggccgctgcttcctgagtagctgggacctcaggcttccgcctcgtgcccgcatccctgctgtgtttaagcagcaggtggtgacctcacttctccctttcctgagcactcagtcccgcatcccaggcggaggccctagggaagtctctgaagctgagcacagggtggactctccctcctgaatgaatggcgaatagaaagagagaggatttctgttctgttctgtgggccatcagcatgaaatcatatgttcctcccaggcagggctttgcatttcacattttagtttgcatgcccgttccagacaattccagggttttgaatcatgcctcaaccttcctggccgctctcccctccaaacacccaaaaaacagaggagctgcctgccaggccaagtgatgcacaggtcccgccccggccccgccctctgccggttctaaagggcaaggtctctccgcctcgcgctccgaccctaccccgcccaggacccgccaaactgttcgcgggccccgcccaggcctggcttctgtcctgcgcgcgcaaaccaggtggcgtatcgcttggagtgaaggtcctaccgcggcatgtgagtttcgctctgtgttgtgttaagtctgcgcttcccaggtccccggcgcttctgtccctaggactttgggtccccacggacctggaaattctcgcttgtcttcattcacatagagcaaattgagatgtccccgtaagagtccgggagttgcttccttttgggtttgaagtcgtccggaggctggtccagtccctggtctttctgctgtagggcagtgtatacacttctatagcgtaattttcctgctcaaaacctttttctgactctcccgccccgtgcttcttaaagtcctcacccgcgaggtggattcccgccctgggcgcctcccaggctcggcccctggagcacagcgccccgggcccagtcctggggaggctgcgtcttctgcctggtcctggaatcctgcaggtgtcacccttgtcttaaggcgccgtcgccccctacgtccctcctcgtgccgggccctgctgctcccgtagtcttccctctgcagtcaccgcttcccctgaaccagcattgggcaggtcccaggggcttgtcctttgacccgggatattcttgcctgcccagttccaccccccggaaaatgcgcttctccgcgatgcaggagtcttactccaaacccgcagagttttgctggtggcaaggagaaccgagggagaaacacagcagggaggacaccgggggatctggggtgctagagagtggggacaggggggtataacagggaagagagaatttaacagggagagcagaggagacgcagagataagaggcggtaatatatagagattgaggacgatcgaaagattggggggaagggcaacaagaggttaaataaggaccgggcgcggtggcttatgcctgtaatcccagcagttttggaggctgaagcgggcagatcacctgaggtcccgagttcgagaccagcctgtccaacatggagaaaccccgtccctactaaaaatgcaaaattagccgggcgcggttgcacatgcctgtaacgccagctattagggaggctgaagctggagaatcgcttgaacctgggaggcggaggttgtggtgagccgagatctcaccatttcactccagcctgggcaacaagagcaaaactccgtccaaaaaaaaaaagtggttaaataagttgtgaggatggagcagaagaggtggaagagaagtaatagagggaagaatggaataaatagcaggagaggagaggggtacaaaatgagcagaatcccagggaaaaagacaagaaaacaagagctagagagaaggggagaatgagagatgtgtaaagaattagggagggaagcacagtaatgaagaaagagtggctgggcgcagtggctcaagcctgtaatcccagcactttaggagactgaggcagagggattgcttgagtccaggagttcaagactagcctaggcaaaatagtgagacccgccatcgctgtcaaaaaaaaaagaaaaaaaaatttaacggggcatgatagtgtagacctgtaatttcagctactctgtaggcagaggctggaggatcacttgagcccaggagctccaggctgctgtgagcagagatcatgccactgtactccagcctggtcaaaagagcaagaccctgtcttaaaagaaaaaaagggttggggactttggatacagatgagtgtgtgagttcattggatatgattagttgtgacatgttgacttctgtctatataatctaataacttgtctaaattatacagatgagtttgagaattttaaaagtcctatctgtgagtcatgtacattctataaatcttggtatcagaggttagcttccacttggaatccctattcagcccgcgggcagtgacattcagttgtgagtcactctcttcccttttcccagggtggggtaggaagtggggcagtgatgtggaaaaaaaaatcactttctgttattatgtaatacttttaattaattaattaatattttgagacagggtctggccctattgcccaggcaggagtacaatggtgttatctactctaactgaagcctcgacctcctaggctcaagcaatcctcctccctcagtctcctgagtagctgagaccactggtgtgagacaccaagcccagctagttgttttttttttctttgtttgtttttttgtagaaacagggtttcagtatgtttcccggggtggtctcaaaatcctgggctcaaaggttcctcctgtcttggccttgcaaagtactgggattacagggatgagccaccgcgcccagcctacatactaattattattagtagtagtagttttttgaggtggagtttcactcctgttgcccaggctggagtgcaagggcacgatcttggctaatgactctctgtgcctttagagttgaagcgattctcctgcgatactaccccctgagtagctgggattacaggcatgcgccaccatgccccgctaattttggattaggaggccgaggcaggagaatcacttgaacccaggaggcagaggttgtggtgagctgagatcgcaccattgtacttcagcgtgggcaataagagcgaatctctgtctcaaaaaaaccaaaaaagaatggagcaaaacaggagaggggtataaaatgagcagaagcccagggggaaatgcagaaaagaaacagatggagagagaaagtgaaaaagggctatgtataaaatgatggagggaagcagtaatgaagatgaagggggaccctgagtgcagatgagcggtgagttgattggatgtgatgatgaagtgatgacacgttgttttctctgtttataatgtaacaaatttaaaattagtttaaattatacagatgagaatgagagttgccaaactcctgtgtctaagtgtggtgcattttataatgatggcgtcagaggcagcttccctctgcaacccctcttcagccagaggacagtgacttgactcattcgttgtggatcaccctcttcccttttcatggctggggtcgggagtgggggaagagaagtagggtaagaagtgactgactctgttactatatggaacgtgatgaaaggagtattaaagtgctttttttctctttttgtaattggtttccttttttctagttcctcctcatttaattagtttagttgtctttttgtttttctttttgagatggagtctctctctgtcacgcaggctggagtggagtggagcgatctggactcactgtaacctctgcctcccgggttcaaggaattctctgcctcagcctcccgagcagctgggattataggcgcccacaaccacacctgtctgatttttgtatttttagtagagacaggattcaccatcttggcaagatggttcttgaactcatgacctcgtgatccaccctcgtcggcctcccaaagtgctgcgattacaggcatgagccaccacgctcggcctcatttgttgttatttatttatttatttatttgagacagagtctcgctctgtcacccaggctggagtgcagtggcgcaatctcggctcactgcaagctccgcctcccgggttcacgccattctcctgcctcagcctcccgagtagctgggactacatgcgcccgccaccgcgcccagctaattttttgtatttttagtagagacggggtgtcaccatgttagccaggatggtctcgatctcctgacctcgtgatccgcccgcctcagcctcccaaagtgctgggattacaggcgtgagccaccgcgctcagcctcattagttgttatttatttatttatttgagacagagtctcgctctgtcacccaggctggagtgcaatggcgcaatctcggtcactgcaaccttcgcctctggggttcatgtgattctcctgcctcagcctcctaagtagttatgattacaggcacgcagcaccatggccggctaattttgtattttcagtagaaatggggtttctccatcttggtcaggctggtcttgaacacctgacctcaggtgatcctcctgcttcagcttcccaaggtgctgggattacaggcatgagccgccgcgcccagcctttaatttttatttttttgagacactcttgctgttgtccaggctggagtgcagtggcaggatcacatctcagtgccgtagcaacctcctgggctcaagtgattttcccacctcagcctccggagtagctggggccacaggcacgccccacgaggcctggctattgtttagatatatatatttatttgttgagactctctgtcacccaggctggagtgcagtggcacgatttcgtctcactgcaacctccgcctcccagggtcaagcgattctcctgcctcagcctcctgagtagctgggattacagacgcccaccaccctcccagctaatgtttgtacttttagtagagacagatttcagcatgttggccaggctggtctcaaactcctgacttcatgatccgcccaccttggcctcccaaagtgcttgtgcaccactatgccctgctaattttagtatttttggtagagacatagtttctccatgttggccaggcaggtctcgaactgctaaccttgtggtggtcttcctgccctggcctcccaaagtgctgggattataggtgtgagtcaccatgcccggccttattgttttcaaagtatgatatattttcaactatttctcctttgagccaagatttcattacatctatattttttgaacattttaaaattgtttctctgtgaaattgtgttcagtttacattgaggtctgtttgctttctagtctttatcatatatcgaaaacattttctactatgtgatatatgatgttaggttgtttcagtgtgtacttgataatgatatcaaggaccttttttctttatcctaacatgaaaatttagttaaagtagcctattccattttcttttcttatgtcatctgaaaaaatggttatctgtgagcttctaagtaagtgtccccctcaagtccctctggtccataatattctctacagatgttgaaggatgggctggattgacttggaaccttggtttagcagagcccatgtgttcatgagaaaagcatttgctcagatctcatttctacagctgcctctttttcagtgttttaaacacctattgctgtgtgtgcacatggtgtgttttgcacatttttctgggagtgagtaatgatatgtttgggattgatgccatcagaaccttacaactcgaaagaagtttcctttgctcaggtatataagatggtcctggaatttttgtttgtttgtttttctttgagatggagtctcgctctgtcgcccaggctggagtgcagtgacatgatctcagctctctgcaacctccacctctcgggttcaagcaattcttttgcctcagcctcccgagtagcagagactacaggtgcccaccaccacgcctggctaatgtgtgttttttttttttttttttttgagatggagtctcactctgtcgcccaggagggagtgcagtggcgcaatctcctctcactgcaagctctgcctccttggttcatgccattctcctgcctcagcctccggagtagctgggactacaggcacccaccaccacacccagagaattttttgcatttttagtagagacgggcattcaccgtgttagccagaatggtaatttgtgtatttttagtagagacgtgatgtcaccatattggccaggatggtcttgaactcctgaccttgtgatttgcccactttggcctgccaaaatgatgggattacaggaatgagccacctcgcctggccgctttttttttttttttttgtaagacagagtgtcaccctatcacccaggctggaatgcagtggaacaatcttggatcactgcaacctctgcctcccgggctcaagtgatcttgcgtcagcctcccaagtagctggaaccacagatgcacgccacgatgcctggctaattttttgtatttttgttagagatggggtttactatgttgcccgtgttggtctcagacttcttggctcaagtgattggcctgcctcaactacccaaagtgttgggatttcaagggtgggtcaccattcctggctggtcttggaattttctagaggaggaagaccaaggcagcctattggccctttcaggccatcacattggaatcagccacacctccttcctcctcacctcagagcttctcaggataacttggtgaaatgtctcccgctgtgagccttagtgagcccacctgtaacatagaggtgaggaataagatcagaaaagctcagtcagtgacactgacccctgaaacgactgacaaaatacagtgtgtgacttttcttctgggagaggataatggtcatttttaactcaaatttcaaatgaattccagttctccaagatgagcaaaaacaggggattagactcaaatcaccttgaaggttatcatctcacagctttcacccacctacacgactccatgtcccctgcaggcctcaaccctgagctctacaatcctgtgtccagtagtctcctcagctctctcctgggacatcaaacaggcatccccaccttcagctgtccataagtgacttcctaaatccccaaacacattcccttgcagtctgcacatctcagatgagagtgaatgtgtacttccgaaaacttagctgaacttgacagcacatattttaaatatgggaaatacattacattatttgtaagtgttgtaatttataatacatagagaaacgtacatgtatatgtgaaaagagtgagaagatacatcacttccaaatcgtttttttttttttgagatgaattttcactcttatggctgaggctggagtgcaatgccatgatatcagctcactgcaacctctgtctcctgggatcaagggattctcctgcctcagactcccgagtagctgggatcacaatcgactttcaaaatgcttttgggttgtgggagaaaaatgtttgaagaccatgtccctatgggtctgtgcccccaggacctctctgacctcatctcctacctgtgccctcctctcttccactgttccagccccacgggccgctttccttttcctggggctgaggttgctcctgtctcagggccttcacttgagctgtccctctctctaggatgctcttcccctcagctgcaagtgacaagcagcctttctttcctaggtccttgttctgatatcatcttctccgggtctcctttgtgatctcccacagccctcattcgacactgcggctgtgaaatcagaaaatcttacagagatctcagttaatttagaaagtttattttgcccaaggtggtcggcgcagagcttaattttatacattttatggagacatgagacatcaatcaatatatgtaagaagtacgttggtttggtctgggaaggtgggagaactttaaacaaaggcaggaagacttgaagcagggaaggggcttttaggtcacagagaactgaggcacaaatggttgcaatcttttgagtttccttttttttttttttttgagatgaagtcccattttgtcacccaggctggagtgcagtggcacgatcttggctcactgcaacctctccctcctgggttcaagtgattctcctccctcagcttcccaagtagatgcccagatcatttttgtatttttagtagagatgtcttttcaccatgttggctgggacggtgtcgacctcttgaccccaagtgatctgccttcctcggcctcccacagtgctgggattacagtcctgagccactatgctgggtctttcttttgagtttgattagcctttcaaaggaggtactcagataggcatgtatgtcagggagcagaggggtgactttgaatagaaggggagtctggttccctaagcagttcccagcttgacttttcccttttgcttagtgattttgggccccaagatttattttcctctggtccacattgactgttttgtgtgactttttttttttttttttttgagatagagtcttgctctgtcacccaggctggagtgcagtggtgggatctcggctcactgcaacctctgtctcctggcttcaagcaattctcctgcctcagcctcctgaatagctgggattatgggcacccgctaccatgcccagctaatttttgtacttttagtagagaaagcatttcgccatgttggccagtctggtcttgaagtcctgaccctgtgatccagccgcctcggcctcccaaagtgctgggattataggcgagagcccctgcgtctggcctctttgtgattatttttgtgcctttgtcatccactgtctggatcctggtgagaacttggccccaagcggagggcagagccagaacgtggggctgtgctgggctcgccccctctgagtggagctcaaccctggcttcacattagagtgcggagcattttgcaaatagagcttttgtgccgctttagcagggattcttattctgacgggatggaacccaccctcagtaatacctgcagtggcgcaggtgcttgtcatctgtgtgcagcattgagcatggaagctctgagtcctgcatttctgagggctgagctcagcctgtgatccacagagaggtgaggggctgtcctctggatgcggtttgatcagggatgggtctgtgccctgaaggagagatcagtccagcccagctccccactgctgcctcgtgtgtggtggctgctccaggaggggggcgagatctgaagaccagggtcaaacatacacttataggtcttcctgtgggactttcttatgtctgcatgatctctggtgcagtgggcagtggggggggcttctttgtacagggtgatgtctccccgttcctgtgtttttatcacaggaagggagtgagtcatatctaacctgaagtcttatttttcttccacatacaggattgatttctaaagactcatgttacatgaggaagcagctcagaagaggaaaggaaaggagccaggcatggctcttcctcaggtgaagtgatattcctctgtggattaatctgtctctttcctttctgaagtgtagtagtattatattgtattgtagtaatgtattgtaacagccagtcttttctgagtctgaagcattttgcctgacacgtttgcttgcactcacccatgcctgccctcagttcctctcatttgctcaaaagaattccatctcctgtgacccagtgacatgaacttgggaagaggctccactgggcatggtcctgggaagggctcacacccagacatggattaacatggggtgtgggcccgttgatgtcattgctgctgggcagcctggattgttcaggggccatatctggatgtcagctctttgtggaccagattagagaaactgcatatgaaatacgtatgttaatgtgcccaggtatgtggcaaattctgggaaaggagacgaataaggagaggtattttgtatctcatttggtaatgcatttgaagccacactagtagatcaagatgtctctgtctccaaactttttgttttgttttaagagacaggatgttggtccaggtgggatggctcacacttgtaatcacagcactttgggaggccaaggcaggaagatcacttgaggtcaggagttcaagaccagcctggccaacatggtgaaaccccatctctactaaaaatacaaaaattagctgtgtgtggcggtgcatgcctgtaatctcagctacttaggagacggaggcaggagaatcgcttgagcccaggaggtggaggttaccatacactgaaattttgccactgcactccagcctgggaaacggagcaagactctgtctcaaaagaaaaagagagggagagagaaggtgtcgctctgtggcttagttctggagtacaatggcacaattcagagtttacagcagcctcaaactcctgggctcaactaatccctcctttagactcccaaagagcctgagtgataggcatgggtcaccatatgtatgtatgtattttaagatggagtctcgctcagtcaccaaagctggagtgcaatgtcaggatctcagctcactgcatcctctccctctgggtttcaagcaattcttctgcctcagcctcctgagttgctgggactacaggatgcaccaccacacccagctagtttttgtacttttagttgggacagggtttcattatgttctttaggctggtctcaaactcctgaccttgtgatctgcctgtcttggactccccaggtgctgggattaaaggtgtgcaccaccatgtctggccttattttttatattgtatttttattttgttgtccaggctggagtgcagtaatgcaatcatagcttgctacagccttgatatcctggcctccagtgatcctcccctcttggcctcccaaattgctggcattccaaatgggagacagccagcccggctggactctgcactttttttgagatggagtctctctctgttgcccaggttgtattgcagtggcgggatctcagctcactgcaacctctgccttccggcttcaagcaattcttttgcctcaacctctggagtatctgggattacaggcattcgctgtcacgcctggctaagttttttgtatttttatagagatatggtttcagcatgttcccaggctggtcttgaattcctgacctcgtgatccactcacctcggtctcccaagtgctgggattacaggcatgagccactgagactgaccaatcatgatagtttttagattcggacttttctttgaaagccatttgactttgtcctctctgaaacaccacttgtatcttagctcatctagagactaaatatcagctcgtatgttgaacataatatctgacatgtctgtagagaaaaccctgtgtttgcttttttttttttttttgagatggagtcttgctctgttgccaggctaaagtgcagtggtgcaatctcagctcactgcaacctccgcctcccggattcaagcgatcctcctgcctcagcctcttgagtagctgggagtacaggtccacaccacgacacccagctaatttttgtatttttattagagacatggttttgccatgttggccaggatggtctcgatttcttgaccacattatctgcccacattggtctcccaaaatgttgggattacaggtgagagccaccgcctggcattgctttttttttttaacatggagtgtcagtctgttgcccaggatggagggcagtggtgcgatcttggctcactgcggcctccatctcctgacttcaagtgattctcctgcctcagcctcctgtgtagctgggattacaggagcctgccacaatgcccgtctaatttttatatttttagtggagacaggtttccaccacattggccagggtggtctcgaactcttgaactcaaataatctgcccaccttggcctcccgaagcattggtattacaagcgtgaaccaccatgcccagccctgtgtttcctttttatttatatagtttttatattgtccataaaatcgagacttccatagcgacttatgggatcttaaaatctttcaaggaaaagtacaataaaatgcaactattgagaaaaaaaattcaaaaataccttaacgtggttttgtcacaacacagtctttgatcaaagaaatacttattttctcttttctcatttcctgtgaaggtgataactcaatcctccataatgttttgttgaaatgtgtgtttcattttagggacgcttgactttcagggatgtggctatagaattctcattggcagagtggaaattcctgaaccctgcgcagagggctttgtacagggaagtgatgttggagaactacaggaacctggaggctgtgggtgaggaaaatgtccctgcagacatgaggagtctgctcttgtctgtcttggctcttcctggttttgtattctcttttgtgattttgccccatacgtggtttttttgtttgattgtttgtttggtttgagatggatctttgctcttgtttcccaggctggagagcaatggtatatcggctcatcataacctccaccttccgggttcaagtgattctcctgcctcagcctcccgaggggctgggattataggcatgcgccaccacgcccagctaactttgtatttttagtagagatggggtttctccatgttggtcaggctcgtctctaactcccgacctcaggtgatccgcccaccttggcctcccaaagtgctgggattacaggcgtgagccaccatgcccagctcattctggtttttgaggagcatcacagaagcgtctctcactggcactgtgacaatgttcatcccataaactaatgatcatcttctctaagcagcagtcagtggtgttgaaatttctcctagcggggacatcatttgggctcacagcctcatatgtatgaggctgttgactgaactcttgttcatttcacatttttcacaccaatatatgtcattgttcattttttgtttgtttgtttgttttttgtttttgtttttgagacagtctcgctctttcacccaggccgactgcagtggcacgatctcggctcactgtaagctccgcctcccgggttcaagccattcttctgcctcagcctcctgagtagctgggattacaggtgcccgccaccatgcccagctagtttttttttgtatttttagtagagacggggtttcaccgtgttagccaagatgctctcgatctcctgaccttgtgatccactctcctcgacctcccaaagtgctgggattacaggcgtgagccactgcgcctggcccattgttcatttttgacaagaaaacctatgttcagtttgttgtagggtcaaccctgtaagagatatggttttcatcaatcttatttagggagcttgtgaggttgaatgaggtttccatggtttagttctactgtcatttccttcagacacagtggctttcaacttgttagtttctatgttgtttttttttttgagtcagagtctcactctgtttccctggcttgagtgcagtggcttgatcttggctcactgcaccctccacctattggattcaagtgattctcctgcctcagcctcttgagtggctgggattacaggcatgtgtcaccacaacctagtaatttttggtagttctattacagatggcagtttcaccatgttggctaggcttcttttgatagcctggcctgacgtgattcacttgcctcggattccaaactgctgggattacagtcatgagccaccacccctggccccatccgagtttgtttttaaggctgaataatactccattttatgtgtataccacattttcctcatgtatttatctgtcgatggatatctgggttggttttttctctttactattatgaacaatactaccaggctgggtgcggtggcccatgcctgtaatcccagcactttggaaggctgaggtgggtgaatcacctgaggtcaggagttcgagaccagcctggccaacatggtgaaaccacatctctattaaaagtacagtttctttttttttttttttttttttttaagatggagtattgctctgtcacccaggctggagtgcagtggtgcaatttcagcttagtgcaacctccacctcccaggtcaggcaatctcctacctcagccttctgagtagctgaaattacagatgttcaccaccatgcccggctaatacttgtttgtatttttttagtggagacagtgtttcaccatactgtcctggctggtcttgaactgctgatctcttgatccacctgcccattatgcctggcgcaagcctggctaatttttgtatttttagtagaggtggagtttctacttgtgattcatccacctgctttttaaaacaagtgaatattattagatggcttcatatattataagttttacaggacagactctaaacttcctttgtttaataagatttgtcggcctttggtgatgttgatgatgagatgccccttttcctatctcactcatttcatcgttctgttagaaatagcttagactggccagccgcagtggcttatgcctctatttccagcactttgaaaggctgaggtgggtagatggcttgaggtcaggagtttgagaccagtcgggcaaacataatgaaaccttgaatctactaaattaaaaaaaactggatggtcgtgatggctcacgcctataatcccaatattttgggaggccgagatgggtggatcacttgaggtcagaagttcgagaccagcctggccaacatggtgaaaccccatatctagtaaaaacacaaaaattagctgggcatgttggtatgcacctgtaatcccagcttcttgagaggctgagatgggagaatcacttgaacctgggaggtggatggtgcagtgagccatgatcacgccactgcactccagcctgtatgacagagttagattccgtttgccacaaaacaaaacaaaaaaattagccaggcatggtggcatgtgtctgtagtcccagctactcacgaggctgaggcacgagactctctttaggtaggagaatcgtgccactgcactccagcctgggtgatgaagcatgactcagtctcaaaaacagacaaaaaaagaaatagctggaactggaaagcttaagacatagaaatttatttctcattaatctggaaagtgggaaatccaagagcaagatgtcagctagattggctcctggtgagagccttcttcgtggtttagcccagccgtcttcctgctgtgtcctgacatgggggaaagaggagcaggcaatgagctctttactgtctctttttataaatcactagtcctggctggacgagctggctcatgagtgtaatcccagcactttgggaggctgagacagccaaatcacatgaggtcgggagtttgagaccagcctgaccaacatggagaaaccacatctctactaaaactacaaaattagccgggagtggtggcacatgcctgtaatcccagctactcgggtggctgagacaggagactcacttgaatctgggaggcggaggttatggtgagccgagatcataccattgctctccagcctgggcaacaacagtgaaactctgaatcaaaaataaataaagaggcggggcacggtggctcatgcctgtaatcccagcactttgggaggccgcgcagtgcagatcacgaagtcaaaagatcgagaccatcctggccaacatggtgaaaccccattgctactaataatataaaaattttctgtgcgtggtggtgcatgcctatagtcccagctacttgggaggctgaggcaggagaatcacttgaacccgggaggcaaagttgcagtgagccgagactgtaccactgcactccagcctgggtgacagagcaagactccatcacaaaagaaatagagagagagagaaagagaaagtgaaagagagaaaaagaaagaaagatattaaaagccttagtcctattcacaattagtcaacacccatgaccaaattctctaaaaggccccatctgcaggaacatcctattggtcctattggtccactatcagatgatagtggaccgagcgcggtggctctcgcctgtaatcctagcactttgggaggccgaggtgggtggatcacctgaggctaggagttcaagaccaacttaaccaacaggagaaaccccatctctactaaaaatacaaaattatcgagtgtggtggtgaatgcctgtaatcccagctactgaggaggctgaggcaggagaattgcttcaacccaggaggcataggttgtggtgagctgatattgcatcattgcactgcagcctgggcaacaagagtggaactctgtctcaaaaaaaaaaaaaaagaaatctgataatcgcttttagccagtacgaacataactgtagttgtgacctcataattgcacttttctacactattagtcaattttttttttttttttttttttttttgagatggagtcctgccctgtcacccaggctggagtgcaatggcacgatctcggctcactgcaacctccggctcctgggttcaaaagattcttttgcctcagcctccaaagtagctgagataacaggcacccgccaccacacccggctgatgttttggtgttcttagtagagatgcagtttccccatgttggccagcctgttctcgaactcctgacctcgtgctccacttgcctcagcctcccaaggtgctgggattacaggttgtgagtcgtcgtgcccagccgttagtcagttcttattccttataatgctgtgtattttcttgacctcatacatcagaaggtagtgatcttaacatgtatttcagttcttatattgtgtgctggtggttaagtagatgttgtggcttttttcttaagagggaattgtttagaattctgcaggctgtataaatgtacttatttgcttgctggttttatcatgggttacaatattttattaattaatttttataattttgcatatggcttttcagtatgtggtatgcaatataactgacacactccactcgttaatgtcaaaagtgccaccaggtgcagtggctcacaccggcaatcccagaaatttgggaggccaaagggggtggagaccagcctggccaacatggtgaaacccggtctctaccaaaaacacacaaactagccagtcatagtggtgtgtgcctgtaatcccaggtacttaagaggctgaggcaggagaatcacttcaacccagcaggcagaggttgcagtgagctgagatggcaccatggcacttcaagctggaatgcaagactgtctcaaaaaaataaaactacaaaaaatggtttcaaaagtcactatgtgcctgttctgtgtggatatatgtaattttatgacatttattgagaaaagtattgtattaactttttttttcttttttttccttttttttttctgtttgaggcatagtctcactttgttgcccagtgtggagtgcagtggtgacatcttggctcactgcaacctctgcctccccggttcaagtgattcttgtgcctcagcctcctgagtaactgtgactacaggcacgggccagcacacctggctaatttttgtaatcttttcttatcttctcagtgctataattgtttgataatacagaatttccattgcttttggttatccttacatgagcttgttgtggattatttaccaatatagtatattgtgtggtgttttttttttgcatttatttgtacacagtaaatatggtttaaatatgaagagtatatatttttctcttccttgatgtgacagtgatatgttttttgcaaactgtgatacactgtagggtcacagtggaaaaatactccttactttaggcttacacatgtttgtgccctgtcagtgttttgtcatgatataggaaataagcttttatagacttgatttgaaggacatgtaattgtctgttatttattaaagaatcttactacttttgtgttcgtaaactttgaagatcatgtttgggaagtttaaaataagtattttttattgtgtcatatttacacacttcagtatgatttaccatctgcacttaattgcaaacgtattggtgtttatattttgtagatatctcttccaaacgcatgatgaaggaggtcttgtcaacagggcaaggcaatacagaagtgatccacacagggatgttgcaaagacatgaaagttatcacactggagatttttgcttccaggaaattgaaaaagatattcatgactttgagtttcagtcacaaaaagatgaaagaaatggccatgaagcatccatgccaaaaatcaaagagttgatgggtagcacagaccgacatgatcaaaggcatgctggaaacaagcctattaaagatcagcttggattaagctttcatttgcatcttcctgaactccacatatttcagcccgaagagaaaattgctaatcaagtggagaagtctgtcaacgatgcttcctcaatttcaacatcccaaagaatttcttgtaggcctgaaacacatactcctaataactatgggaataattttttccattcatcattactcacacaaaaacaggaagtacacatgagagaaaaatctttccaatgtaatgagactggcgaagcctttaattgtagctcatttgtaaggaaacatcagataatccatttaggagaaaaacaatataaatttgatatatgtggcaaagtctttaatgagaagcgataccttgcacgccatcgtagatgtcacactagtgagaaaccttacaagtgtaatgaatgtggaaagtccttcagttacaagtcatccctgacatgccatcgtagatgtcacactggtgagaaaccttacaagtgtaatgaatgtggaaagtccttcagttacaagtcatcccttacatgccatcataggtgtcacactggtgagaaaccttacaagtgtaatgaatgtggaaagtccttcagttacaagtcatcccttagatgccatcgtagacttcatactggaataaaaccttacaagtgtaatgagtgtggcaagatgtttggtcaaaattcaacccttgtaattcataaggcaattcatactggagagaaaccttacaagtgtaatgaatgtggcaaggcttttaatcaacaatcacacctttcacgtcatcatagacttcatactggagagaaaccttacaagtgtaatgactgtggtaaggcttttattcatcagtcaagccttgcacgtcatcatagacttcatactggagagaaatcttacaaatgtgaagaatgtgacagagttttcagtcagaaatcaaaccttgagagacacaagataattcatactggagagaaaccttacaagtgtaatgagtgtcacaagaccttcagtcacaggtcatctcttccatgccatcgtagacttcatagtggtgagaaaccttacaagtgtaatgaatgtgggaagacttttaatgtacagtcacacctttcacgtcatcatagacttcatactggagagaaaccttacaaatgtaaggtttgtgacaaggctttcatgtgccattcttatctggcaaaccatactagaattcatagcggagagaaaccttacaagtgtaatgagtgtggtaaggctcacaatcacttgattgattcatcaatcaagccttgcatgtcatcatagacttcatactggagagaaaccttacaaatgtgaagcatgtgacaaagttttcagtcacagatcacgccttaaaagacataggagaattcatactggagagaaaccttacaagtgtaatgagtgtggcaaagcctttagtgaccagtcaacacttaccatcaggccattcatggtgtagggaaacttgactaatgtaatgattgtcacaaagtcttcagtaacgctacaacgattgcaaatcattggagaatccataatgaagagagatcttccgagtgtaataaatgtggcaaatttttcagacatcgttcataccttgcagttcatcagtgaactcatactggagagaaaccttacaaatgtcatgactgtggcaaggtcttcagtcaagcttcatcctatgcaaaacataggagaattcatgcaggagagaaatgtcacaagtgtgatgagtgttgcaaagcctttacttcatgttcacacctcattagacatcagagaatccctactggagagaaatcttacaaatgtcatcagtgtggcaaggtcttcagtccgaggtcactccttgcagaacatcagaaaattcatttttgagataactgttcccaatgcagtgagtatagcaaaccatcaagcattaattgacattggagtcaattcagcattgacttgagtttgtgttgacttaacattgagttcaagccttaattgacatgcaggtgtttatgataagaggattgggccaggtgcagtggatcacgcctgtaatcccagcacattgggaggccaaggcacataggtcacttgaggtcaagagtttgaaacaagcatggccaagagatgtgagccagttttcccagcctgtttattattattttttgagatggagtgttgctcttgctgcccaggctagagtgcaatggtgcgatcttgactcacagcaacctccgcctcctgggttcaagcgattcctctgcctcagcctccctagttgctgggattacaggtatatgccacgacgcctggctaattttttgtatttttagtagggaaagggtttctccatgttggtcaggctggtctcaaactcccgatctcaggtgatccgcccacctcagcctcccaaagtgatgagattacaggcatatgccaccgcgcctggcattgtttcttcttttccttttttttttttttttttttttttgagatagtactttttaaagagatagtacttttttgagatagtacttttttaaagggatataccatagtagttttaaaagggatatcaggctgggtgtggcagctcacgccggtaatcccagcactttgggaggccaaggcaggcagataacaaagtcaggagattgagaccgtcctggctaacacggtgaaacctcgtctctactaaaaatacaaaaacttagccgggcatggtggtgggcacctgtagtctcagctactcagggggctgaggctggacaatggtgtgaacccaggaggcggtgcttgcagggagccgagatcgtgccactgcactccaggctgggcgacagagtgagagtctgtctcaaaaaaaaaaaaaaaaagatatcaaacccggggtgtctcatcccacagcactttggaagactgaagtgagtggatcatctaagatcagagttcaagagcaccctggctaacatggtgaaaccccatctctactaaaaatacaaaagttagccaggggtgggggtgtgcacctttagttccagctacttgggacactgaggcatgagaatcacttaaacctgggaggtagaggttacagcgaatcaaaaccgtgccactgtactgcagcgaggttggcagagtgagtctccatctcaaacaaacaaatgaaaaaaacagacatcaaaaatgcttttgttctcgttgtgtcatagacttcccttttttttccttctggttcctcttcagttctctatttattttttcttttttgcagattgagtttgagatatatcttagttttaatagttttatttcttaacacataatgacttctgaaagatgcctttgcagcatcctgtaatcagctcacatcattcgtttctgtacttgtatattttccagttgttttccggttgaccccaaaattcgtgagatttttttcctacaacaatttcaaaagagttgctgtttgaaattagttgcatccagttcagatcgaggtctgcatgctttctagtctttgttatttattggaaggctgtggtacctactacttaagtttgattgttgcagtgtgtacttggtaaagatgtcagtgaccttttaaataaacatcaaaatgtagtttaagcagttagtctgtttttcagttttctttccttatgtcattttttaaaatcttgagctgggagctatttattgtgtgtttccctcaaggccctgtggtccattctggaaaaatgttgaaacatgggctggagtggcatagagcgctgctccaaaagcacccatgtattcttttcttttttggaaatggagtctcgctctgtcagcttggatggagtgcagtggtgcgatctcagctcactgcaacctctacctccttggatcaagtgatgctcctgcctcagtctcctgaggagctggaattacaggcacccaccagcacacccagctagtttttgtatttttagtagagacagggtttcaccatgtttgtcaggctggtctcaaactcctgacctcgcgatccacccgactcagcctcccactgtgatgggattacaggcatgagctaccacgtcgagactcttttttttttttttttttagatggagttttgcttttgttgctgaggctggagtgcaatggtgcgatctggtgtcactccaatgtcttcctcctgggttcaagtgatttctcctgcctcatcctactgagtagttgggattacaggtgccctccaccactcccggctcattttttgcatttttagtagagacagggtttcatcatgttggcaggctggtcttgaactcctgacttcaggtgatctgcccacctcgacctcccaaaatgctaggattacaagcgtgagccattgtgcctgaccactcatgtattcttgattgaaataatttgcttatttcttagttctacagctgaccctctttcactgtttccaaggtcaatagctgtgtgttcacacttctgcattttataaatgttcctgtgagttttttgtaaggaagaattaactgtcaggaatcaatgtcatcagaaccttgcaaaagaagtttctttagcccaggtttgtgaaagaggtttctctaattttcaaggatgggggtgataagagcaacctttgccattagcccttccaggaccccatgtaagactttagacaccttctcactcatctcagaccttctcagggtaacttggtgaaaatgtcttccgatctgagccccagtgagcctccctgcaacttggcgacgaggggcttgaccagaaaaggtcaacccgagtgtccctgaccgttgaaatgattggcaaaatggagtgcgtgtctgggtgtggcttttttttttttgaggagtgcccagttgtgattagaattttcaatgggatgcagtgccctaaaaatgaaaaacaaaagcagaagaatggaagaaatagaggtagactcagacacagagaccatcttcaaggcctttctctgtatgaggacatcacagcaaaatctaaagcaggtcacgtcaatccctggcagggaaccctccaccggcttcccgtgttccccaggacaaaagcccaacccctcactgtggctccacagccccgtgtgcagggcccctgccagtgtccagcctcctcctggcagcttgccctcatctcatgactccctctgccccagtcacatttgcttttctcttttcccaaacatcaaaacccttcctgtctcaggtcattgtccctgctcttaccctatgtaccctgtccctttctcctccttcaggtctaggctcagagctctctcccatgccctcccacccctggtctcaagctcctgagctcaagtgatctacccacctcggcctcctagagtgctgggatgacaggcatgagccactgcaaccagcctctgcatggggtttcctcaactttaggtctgtgccctgaaggggagctcattccagcccagttcccaactgctgcagcatgtgtgtgtgggcttctccagaaggggagccagagtttccctgtaggagtttatcctccatggtgaggagggccgcaggggggactgtatttgctcagggtgaggtctcctttgtgtcaggcctctgagcccaagctaagccatcgtatcccctgtcacctgcacgtatacatccagatggcctgaagcaactgaagatccacgaaagaagtgaaaatacccttaagtgatgacattccaccattgtgatttatttctgcaccatcttgactgatcaatgtgctttgtaatctcccccacccttcagaaggctctttgtaatcctccccacccttgagaatggacttggtgagatccaccccctgcctgcaaagcattgcccctaactccaccgcctgtcccaaaagctacaagaactaatgataatcccaccatactttgctgactctcttttcacactcagcccgcctgcacccaggtgaaataaacagcctcgttgctcacacaaagcctgtttagtggtctcttcacacggacgagtgtgacactgtatgtgtggttgtgttccagggagggggtgtgtggattctgagcaataaacagcatttttaacattcatgattgacttctaaagactgttggtacgtgaggaagaaacctggaagaggaagaggaaagcaaaggagtcaggaatggctcttcctcaggtgagatgatattctcggtggattgttctgtctccttcctctcagaaaccctgggccttggagttgggaatcttctctgggtctcaagtgtcctgcctgacaggtttgctcacacccatgtcttccttcagtccctctcatctcacttagattccatctcttgtaacccagtgacatgaatttgggaagaggctgcactgggcatggtcctgggaagggctcacacccagacatggatggagacagggtgagggtcctgtggtgtcagtgctgttgggcagcggggattgttcaggggccacatctggatgctctgtcagctttctgtggaccaggattagagcagctgccaatgggagtcgcgtatgaatgtgcacaaagtacgtgtaaattctagaaaacgaaaccaaaaacagaaaatcttttttccccctgattttatactacatttttaggtaatggattgagttcgtgtttctgactccaaaaatcgtactaattagaatggaaagttcatacagacatgaatgatagaaggtgttttattccatcattagtttaagaataggaaatcaacctgaataatagcaggagattcattcaaccactcttaacacattaagttcatggagactggggttactgtggagaggcttgtgaaacaggtgtttttggtaaaaatggttacaatttattttttgagatggagtcagcctctgccacccaagctggagtgcagtgacatgatctcagtttactgcaacctccgtctcctgggttcaagtgattctcctgcctcagcctcccaagtagctggggttataggcatgttccaccacggccatctaattttttgtatttttagtagagatggggtttcatcatgttggccagggtggcctcaaactcctcacctcaggttatccgcccacctcaggctcccagagtgttgggattacagacactagccactgtgctgggtccttttgagtttctgattagcgttgccaaaggaggcactcagatatgcatgtatgtcagggagcagagcggtgactttgaatagaaggtgagtctggtttcctaagcagttcctagcttgattttaccttttgcttagtgatttggggctccatattcattttcctttcacacagcccaaccctcacaccacctgtggtctatcttgcctgttctgtgtgattactgttgtgcctttgtcatccactgtctggatcctagtgagaacaaggccccaaggggagggcagagccaaaacatggggctgtgctgggctcgccccgtctgagtggagctcaaccctggcttcacattagagtgcagagcattttgcaaatagagcttttgtgctgctttagcagggattcttattctgacgggatggaacccaccctcagtaatacctgcagtggcccaggtgcttgtcatctgtgtgcagcattgagcatcgaagctctgtatcctccatttctgagtgctgagctcagcctgtgatccagagaggtgaggggttgtcctctggatgcggtttgattagggatgggtctgtgccctgaaggggagatcagtccagcccagctccccactgctgcctagtgtgtgggggcttttctaggaggggagtgagatctgaagaccagggtcagatatacacttgtaggtcttcctgtggtagtttcttatctctgcatgatctctggtgcagtgggcagcagaggaccgtctttctacagggtgaggtctcccctgtctgtttttgccccaggaagggagtgagtcatttctaacatgaaagctcgtctttttttttttttttttgtggggaaaagaaagatcagaatgttactgtgtctttgtagaaaagggagacataagaaactccattttgatctgttctaggaaaaattcttctgctttgagatgctattaatctgtaactttagccccaaccctgtgctcacagaaacatgtgctgtattgaatcaaggtttaatggatttagggctgtgcagggtgtgccttgttaacaatatgtttgcaggcagtatgcttggtaaaagtcatgccattctccattctcagttaaccagggacacaatgcactgcggaaagccgcagggacctctgccctagaaagcctgggtattgtccaagtttccccccactgagacagcctgagatatgtccttgtgggaatggaaagaccttacatccccgcgcctgacacctgtaaagggcctgtgctgaggaggagtagtgaaagagggaggcctctttgcagttgagataaaaggaaggcttctgtctcctgctcatccctgggaatggaatgcctcggtgtaaagccgaccattggttctattctgcgataggagaaacctgccctgtggctggaggtgagatattctggcagcaatactgctctgtgactctttgctacactgaaatgtttgtgtaaagtgaaacataaatctggcctacatgcacatccagtgaagggcgccagcccctccacacctgtgagtatttctcatcaggtgggatgagagactgagaaaagaaataagacacagagacaaagtatagagaaagaacagtgggcccaggggaccggcgctcagcatacggaggacccacatcggcgccagcctctgagttacctcagtatttattgatcattatttttactatcttagcgaggggagtgtagcagggcaacaggtagggagaaggtcagcagggaaacaagtgagcaaaagaatctgtatcatgaataagttcaaggaaaggtactgtgcctggatgtgcacataggctagatttacgtttctcttcacccaaacatctcaatgtagcagagtaacagagcagtattgcctccagcatatcttacctccacctaccgggtggttttctcctgtctcagaatggaaccaatgggaatggtcagctttacagggagacattccattcccagggatgagcaggagacagaagccttcctcttatctcgactgcaaagaggcctccctcttttactactcctcctcagcacagaccgtttactggtgtccgggtgggggatggtaaggtctttcctttcccatgaggccatatctcaggttgtctcagtgggtcccccttggacactgtccaaggtattgtccaccttgcacaatacccaggctttcttgagcagagctccctgctgctttctgcagtgcattgtgtccctggttaattgagattggagaatggcgatgacttttaccaagcatactgcctgcaaacatatgttaacaaggcacatcctggccgagcatggtgactcaaacctgtaatcccagctctttgggaggctgaggcaggcagatcacaatgtcaggagtttgagaccagtctgaccaacatggtgaaaccccgtttctactaaaattacaaaaattagctgggcgtggtggcgggcgcctgtaattccagcgactcgtgagtctgaggcaggagaatcgcttgaacctgggtggcagaggttgcagtgagccgagatcatgccactgcactaagcctccataacaaaatgatactccccctcggaaaaaaaacaaaacaaaaaacaaaacaaggcacatcctgcacagccctaaatccattaaatgttgattcattacagcacatgtttctgtagcacagggttggggctatagtttacaggttaacagcatctgaaagcagaaacaattttccttagtacagatcaaaatggagtttcttacgtcttccttttctacatagacacagtaacaatctgatctctctttcttttccccacaatccaggcatggtacatttccttaaatttattaatgatacagattcctttgcttatatgtttccctgctgacattctcctcaccatcaccctgttgccctgccgcactccccttgcgaaaatagtaaaaacagtgatcaataaataccgagggaactcagagatcagcgccagtgcaggtcctcgcatgctaagtgtgctggtcccctgggcccactgttttttctctatagttcgtctctctgtcttatttcttttctcagtctctcatctccacctgatgacaaatatccgcaggtgtggaggggcaggcccccttcatttttcacatacaggattgatttctaaagactcgtgttacatgaggaagcagctcagaatgttgtaagagagcgagttagagaaacaccatacttagagacgaattcaggcgtccttttttagctggtgaccaagagatggcttcacgctcaaaattctctcagccctgaagaaggggctagattttcttttataccttggtctaagaaggggaggggatagcctagccgaagcaattttacagaaacagaataggcaaaaagtaaaaaattaatggttacagagatagttacagaaaaacaaacagttccaggcacaggggcttgaactatcactaagagataaatgcagcggcttttaggtaccttccaccgagcacattcccaggggctgcttgtacagcctgcctgaatatcttatcagcaggtgcattcctggatgtgcttggagtcagcttgcactatttattcccttaaggcggataaagggcactgcaagtgaagaagctaaaatggagtctgtccggctctctctctaggagagtcacttaggttaaaacgaggtagggtagccgggcgctgtggctcatgcctataatcccagcactttgggaggccgaggcgggcggatcacgaggtcaggagatcgagtccatcctggctagcatggtgaaaccccgtctgtactaaatatatataaaaaattagctgggcgtggtggtgggcgcttgttgtcccagctactcgggaggctgaggcaggagaatggcgtgaacccaggagacggagcttgcagtgagcggagatcgggccactgcactccagcctgggcgacagagagagactccgtctcaaaaacaaacaaagaaacaaacaaacaaacaaggtagggtatcacaagaagaggaaagaaaaggagccagggctggctcttcctcaggtgaagtgatacttctcggtggattaatctgtctctttcctttttgaaatgccaggtattgtagtagccagtctttcctgagtctgaagcgtcctgcctgacaggctcactcgcactcacccatgccttttctcagttcctctcatctgctctgagattccatctcctgtgacccagtgacaagagcttcttaagaagctccactgggcatggtcctgggaggggctcacacccagacatggatggacacggggtgtgggccccttggtgtcagtgctgctggacagcctggatggttcaggggccacatctggatgtcagctctttgtggaccagatcagagaaacaacatatgaaatacatgttaatgtgcacagatatctggtaaattctgaaaaaggagaccaataaagggagatagtttgtatctgacttggtaatgcatttgaaatcactttgggggcggggcctggttagacggtgggggccgggcctggggtggggcaagagggaggaggctgcttggaggtcgctctggacagcgggacggggcggggccagaggtttatcctcgtttgggggcgggacctgagatggggtgttgttcttaagggcggggcctggctgcgatgggtcgggggctctctcctcagctgggcccatgatgtgacctgctgtcatcctcttgacctccaggactggatccccggggttctgattggtggattgtttctggtgtgccgtgatattacccctaatatcacagggatgcttcctgccctttttaagttagcatttcaaacaatcgaaggtaaaacaacatattgtagtgggccaactgtactgaacgctgaatcgttttttctctgaagttgaaaacggttttaatgtaaagcgccttttttgagcaggtagagtcgcgcatcctgcaggcggggcgagctcccctcaggctggggcaggacgggggacaggggcaggtacctcggtaaaggggtggagtggggcgctgcttacaaaggggactgacaattagaatggcttagtaaactaagcaaggtcctgggttgtttgagtggataatggaaatagaaaggtgacatggaaaactgcctattatacacctattataaaggtggaggaaattttcatatttcatggaaataaagccagaactcggagcggtggatcacatctgtcatcccagcactttcagaggccgaggtgggaggattgcttgaacccaggagtgtgtgatcagccagggcataatagtgagacctcgtctctactaaaaataaaaaaaaaatcagccagatgtggtggtgcacacctgtgttctcagctgctcggggcgctgagatgaaaacatcacttgaggccgggcgcagtggctcacgcctgtaatcccagcactttgggaggctgagacgggcagatcacctgaggtcgggagttcgagaccagccttaccaacaaggagaaactccgtctctactaaaaacacaaaaaaattagctgagcatggtggcccatgcttgcaatcccacctactcgggaggctgaggcaggagaatcgctcgaacccgggaggcggaggttttggtgagccgagatcccgccactgcactcaagcctgggcgacagagcgagactccgtctcaaaaaaaaaaaaaaaaaaaaaaaaaaaaaaaaaaaaaagaaaacatcacttgagccagggagttggacgctgcactgagccctgatcttgccagcacactccaacttggatgacagagctagaccccgtctcaaacaagcaagcaaataagtgagaggcgtaattcctccttcaaaaataaaggaagagattttctttcatgtagtctcttttcttaggatatttatttagaaaatgtgtaaatgaattttctctgtcttctgaagcggtatgttatttgagacagagtttcgcgcttgtagcccacgctggagtggaatggcgtgatctccgttcactgcagcctccatctcccgggttcaagccattctcctgcctctgcctcccgagtagctgggattgcacgcatgtgccgccacgcccggttaatttcgtatttttagtagagaagggtttttccgtgttggtcagactggtctcaaactcctgacctcaggcgatccgcccgcctctgcctcccaaagtgctgggattacaggtgtgagccgctgcactcgaccagaagtggaatttttttagaaaagaactaaactgttttttagcttaatgacccagggatgtatttccgaaggacttgggagctctctttgaaaggcaaccaacaacagagatagcacttgtgtctcagtaggaaattaaattattcaaacatcaagtgattccaatttaaagcaatggatatttaaataattctgagccttgagaggaatgtggtcatgcaaccagagtccagtggaatgcaggcgcaacttctaagagttttcctgtaaataatttggaaaactggccatgcacagtggctcacgcctgtcatctcagcactttgggagactgaggctggcagatcacgaggtcaggagacagagatcatactggccaacatggtgaaaccccgtccctaataaaaatacaaaaattagctgggcatgttggtgcatgcctctagtaccgtctattctggaggctgagccatgagcatagggagtcggaggttgcagtgagccgagattgcgccactgtactccatcctggcgacagagcgattctccatctcaaaataaatacataaatagcaataaaaataaaaaaaataattaggaagactaagcagccccagcgatatgacctcctcagagcattgtgccttcttacgcagtgataaagtaaccttccttgaagtgtatcaatccatcaccaatcaacttgctgcaacctatgcactggtcttgaatggaaaacgtggtgattctgctaaagcatctctgtctttccctgtgtgtgaaaccttaacgtctctactttggaacgctgatcccatttatttggagttgatgtttccaggtggctttcttcaagctttgtgttcacattaactctgtacttaatcatatattttaaattttattatttactgctgacatcaatttctgtcgtatggtaggcgcctgaccagagagggcacctgtcgccatgttgtaaaactcaaacttgccaaaaagacatgggttagggtttcttcccctccctcgggatgaagctagttagctgacacagatggtcacctccattaccaagtagagccaggatgaactatgtgcgaccaagggtgttgtcaagtcctcttccctgaggactgattagtgtttatcttgaaaatatgtccttaatgggttgtatagaacagtgaagtttctttctctcttttcaacctcttagctgtttgcctctatttcccatcacattctggtcaaggcttattgatttatttatttagagacggaatctcttctgtcgcccaggctagagtgcaatggtgcgatctcggctcattgcaagctccgccttctgggttcacgccattcttctgcctcagcctctccgagtagctgggactacaggcgctgggcaccacgcccggctgattttttttttttgttttttttgagaccgagtcttgctctgtcacccaggctggagtgcagtggtgctatcttggctcactgccagctccgcctcctgggttcacgccattctcctgcctcagcctccccagcagctgggacacaggtgcacgccaccacacctggctaatttttttgtatttttagtagagacggggtttcaccatgttagccaggatgacctcgatctcctgacctcgtgatccgcctgcttcagcctcccaaagtgctgggattacaagcgtgagcccccatgcccggtcctaaggtttatttattaacaaaatggtttttatttctttctctgttatcgtcgtggagatgatttctcatttgggataatattttttagttttcaattatattttgtcaacatttaaaaagcaaagtaaagaatatttcttgggccaggcatgttggctgacgcatgtaatcccagcattttgggaggctgacacaggcaaataacttaaagtgaggagttcgataccggccaggtcaccgtagtgataccccgtctctatgaaaaatacaaaaattaaccgggcatcgtggcacgcgcctgtaatgccagctgctcccgaggctgaggcaggagaatcgcttgaacccaggaggcagaggctgcattgagttgagatctcgccactgcactccagcctgggcaacagaaatactgtgtctcaataatagtaataataataataataataataaagtaatagatctcttccacaaatgtgctgggacaactaactggatatccacatggaaaagagtaatgttggatccctatgtcacaccatcaaaaattttatttaaaaaagttttttttttttttttaaaaagggaaaaggcccgggcgcggtggctcacgcctgtaatcccagcactttgggaggccgacgtgggcggatcacctgaggtcgggagttcagcctggctaacatggtgaaaccctgtctctactaaatatacaaaattaactgggcatggtggcgcatgcctgtagtcccagctactcgggaggctgaggccggagtatcgcttgaaaccaggaggcggaagttctagtgagctgggatcactccacggcactccagcctgggcgacggagtgagactctgtctccaaaaaaaaaaaaagggaaagagagagagagagactaggaagggagacctgccgcagtgggtgttactttgtcgcccaggctggcttgggaccccaggctcagcaattctctccgttgcttcctgagtagctgggacctgaggctcccgcccccgcgcctctgctgtgtttaagcagcaggtggtgacctcactccttcctggcctaagcactccgtcccgcacccctggcggtggctttaaggaagtctctgaagctgagctcagggtggactctccctccctagtgaatggagatagaaagggagaggacatctattctgttccgtgggccgtcaccatgacatcgtacatgccgcccaggcagggctttgcatttcacattctagtttgcatcccggttccagacaattccagggctttggaatcatgcctcagactttctggcgctctcgcctccacaacctaaaaacagagacgctaggagagaggctgaaagacgcgcaagtcccgccccggccccgccccggccccgccctctgccggttctaaagggcaaggtctcagcgcctcgcgccccgccgctacctcgcccaggccccgcccacctcctcccacctcccgcccaggcctggcttccgtcctgcgcgcggagattaacgcaaacccggaagcggatcgggtggagtgaaggtcacgtcgccatggtgagttttgctctgtgttgcattaagtctccgcttcccaggtccccgccgcttctgtccctgggacgtggggtccccacagacctggaaattctcgcccgtcttccttcgcccagagcaaattgagacagcccagtgagaggccgggtgtcgcttcctttcgggtttaaagtcgtctggaggctggtcccgtcccgggtctgtctgctatagggcaatgtatacactttctattgcgtagtttttctgctcaaaaccttcttctgactcttccctcctcgcgctatttaaagtcttcacccacgaggtggattcttgcccggggcgcacctcccagccacccctcgtcggcccctggagcgtcgcgccgcagccccagtcccagggaggccgcgtcctctgcctggtcctgggatcttgcagaccccatccttctcccaaggcgccgtcccccctcctcccacctccctactcgtgccagagcctgcggctccccaggtctctcctccgcagtcaccgcttccattgaacccacactgggaaggacgcagggccctgtcctgtgacatggggtcttcttgcctgccgagctccagcccttggaaaacgcgctcctccgggatgcaggcgtcttactccaaaccctcctgcgattgtgtgggccgaagggatcaggagacagacagcagtagaaaacctgagacagagaaagaataagaaaggcccataacagatggcaaaatagaggattggtgagggatatgccaagatatggtgaaagtggaaaaagaaagcaacaaaatacctagaaaagcaggtggagaaaagcaactggagaaatgtagagaaaagctagatgtacacagagatgaaggacggcaaggtagggagagtggcagcaaagagggaggctcatcagagtgagggagagagggagggatttggagccagggcagacagagcagagtggtgctggtgtcaaggagaaccgagggagaaacacagcagggaggacacctggggatctggggtgacacagagtggggacaggggagtatatcagggaagagagaatttaacagggagagcagaggaggcgcagagatgggtgaagaggcagaaatagatggagattgaggacgattgaaagattggggagaaggagcaataagaggttaaataagttgcgaggatggagcagaagagatggaagagaaggaatagagggaagaagggggataaacagcagaagagaagaggggtacaaaatgaagagcagaatcccagggagaaagaaaagaaaacaagagctagagagagaagggggagaatgagagatatgtacagaattagggagggaagcgcagtaatgaagaaaggggggctaggcacagtggctcacgcctgtagtctccacactttaggagactgaagcaagagaattgcttgagtctaggagttcgagaccagcctgggcaacatagtgagacccctatctctgccaaaaaaaaaaaaaaggaaataacggggcataatcgtgtgcacctgtactcccagctgctctggaggtggaggtaggaggatgacttgagctcaggaggtccaggctgcagtgaactgagatcatgccactacactgcagcctggtcaacagagcgagatcttgtctcaaaagaaaaaatggggcgagagactgggtttagatcagtggatgagttcattggatatgattagttgtgacatgttgacttccctgtatataatctaataactaaaaacttgtttaaattatacagattgagaattttaaaattggtgtctataaaacatgtacattctataaatcttggcatcagaggttatgttccacttggaatccctattcaaccagagggaagtgacttattcagttgtgaatcactgtcttcccttttcctaggattgggaggatgtggggtagagaagtgggaaaaaagtcgctgtctgttattacataatacttttaatttaattaattaaatgatattttgagtcagggtctggctgtatcacacaggctggagtgcagtggcgtgatcctctaactgtagcctctacctcttggactcaagtgatcctcctacctcagccttctgagtagctgggaccagaggcatgagccaccaagcccagctagtttacatatatatatatatatatattttttttttttgtagaaacgtggtttcactatgtttcccaggctgttctcaaaaccctggggtcaaagggtcctcctgccttggcctcccaaattactgggattacaggtgggattacagggatggcccaccgcgtctggcctacatagccccccccttttttttgagagggagttttgttctttttgcccaggctagcgtgcgatggcatgatctcagctcaccacaacctccgctccctggcttcaaacaattctactgcctcactctccagagtagttgggagtacaggcatgcaccaccatgcctggctaattttgtgtttttagtagagacgaggtttcttcatgttggtccaggctggtctttaactccctacctcaagtgacccgctgcctcggcctcccaaagtgctgggattcctggcgtgagccaccactctcaacccatagtagtttttaaaagggacatcaaggcatggtggctcacgcctgtaatcccagcacgttgggagacagaggtgggtggatcatgaggtcaggagttcaagaccagcctggctgacacagtgaaactcaatctctactaaaaaatacaaaaattagccaggcatggtggcagatgcctgtaatcccagctactcaggaggctgaggcaggagaattacttgaacccgggaagcagaggttgcagtgagccgagattgcatcactgcatgccaggctgggcaacggagctagactccatctgacaaaaaaaaagagagaaagaaaaagtaaggaacatcaaagttgggcctggtggctcattcctgtaatcccagcactttgggagcaaatcactgaaggccaggagctcgagaccaacctggcctacatggtgaaaccccgtctctaccaaaaatacaaaaattagctggccatgtagacatacgcctctaatttcacctactccggaggctgaggcaggagaattacttggacccggctgggaggcagaggttgcagtgagccatgatcacactactgcactccagcctgggtgacagagtgagactccgtctccccgccccccaaaaaaagaaaaattagccaagggtggtggcatgcgtctgtagtcccatctactcaggaggctgaagcaggagaatctctttaggcaggagaatcatgccactacactgcaagctgagtgacagagtgtgacttggtctcaaaaaaacaaaaaaagaaatagcaatcagctctttaatgtctccctttatataagcagtagtcctggccatgttcggtggctcacacttgtaattccagcactttggaaggctgatgtgggcgaatcacctgaggtcaggggttcgagaccagcctgaccaatatagagaaacccggtctctataaaactacaaaattagtgtgtaggtgtggtggcgcgtggctgtaatctcagctactcgggaggctgaggcaggagaattgcttgaacctgggaggcaaaggttgtggtgagccaagatcgcgccattgcactccagcctgggcagcaagagggaaactccatctcaataaataaataaattaattaattaattaataataaaaataaaagcagacgtattcacgtgtagtcaacacgcatgaccaaattctctcacaggcaccatctgcaggaacatcctattggacaataagaactctgaacatcgcttttggccaatataaacattcagaccaggaagtctgcatcatatttttgatgtttttattgtgcaatttgttttatacaatgttttctgtgatctcagtttataaattttcccagtacacattctatgttttatattttacacacagtaactagataactaagggcaatgaatatatataaaattgctgtattgcctggtgttatgtaactgtacttgtgacattgtaattgcaccctctgacactgttagtcagttcttattccttttaatgctgtgtatttacttgaactcatacatcagaaggtagtgatcttaacatgtatttcagtcttatagtgtgtgctggtggtaagtagaagttgtggcttttttcttgagagagaattgtttagaattctgcaggctgtataaatgtacttattatttgcttgctggttttatcatgggttagaatagtttactgattaatatttaagatttcacatatggcttttcagtatatgatatgtaatggaactgacacactgcacttgttaatttcaataagtgcctgttctgcgtggatttaggtaattttatgacaggtattcagaaaaaggttgtattaacatttttttttttttgagatggaatctcgctctgtcactcaggctggagtgcagtggcacaatcttggctcattgcaatctctgcctcccaggttcaagtgattcttgtgcctctgcctcctgagtagctgggactacaggtgaccgccaccacgcctggctgatttttggaatcttttcttatcttctctgtgctacgattatttgataatacagaatttcaattgattttggttacccttacataagcttctggtggattatttaccaatataatatattgtgtggtcttttaggatttatttgtgtacagtagatattgtgtaaatatgaaggatctatacttttcattgatgtgacagtgatatgttttttgcaaactgtgatacattttagggtcacagtggaaaaatactccttactttaggcttacacatgtttgtgccctgtcagcgttttgtcatattggaaataggcttccatagaaatgatttgaagtacacgtaaagtatttattaagtatttattaaagaatcttactccttttgtgttcctaaactttgaagatcatgtttgggaagttcaaaataagtattgttttttgtgtcatatttacacatttcagtatgttttaccttctggacttaattggaaacgtattggtgtttatattttgtagatatctcttccaaatgcttgatgaaaaaggtggaagggtcacttgacccagggagttgaaggctgcagtgagccctgtttttgccaccacactccagcctgggtgagtgagctacaccctatctcaaacaaacaagccaataaatgagaggtataattcctcctttgaaattaaagaaggagattttctttcctttcatctcttttcttaggacatttattagaaaatttgcaagtgcattttctgttttctgaggtagtatgttttctttcttttcttttgtttaattttcttttatttccttttctgttgttttcttttctttcctttccaacggagacacagtttcgctcttgttgcccaggctggagttaaatggtgcgatctcggctcactgcaatttccatctcccaggtacatgagattctactgcttcaacttccagagtagctgggactacaggcacccgctataatgcctggctaatttttatagttttgtagagacggggtttcaccatgttggccaggctggtcttgaacttctgatatcagatgattctccagccttggccttccaaagtactgggattacaggtgtgagccactgcgcccggcccagggatgtatttctgaagaacttgggagctccttgaaaggcaaacaacagccacgcgcagtggctcacgcctgtaatcccagcactttgggaggccaaggcgggtcaatcccgaggtcaggagttcgacaccgcctgacaaacatgttgaaaccctgtctctactaaaaatacgaagaaattagccgggcatggtggcacatgcctgtagtcccagctactcaggaaaattgtttgaacctgagaggcagaggttgcagtgagccaagattgtgccactgcactgtagcctgggtgacaaagtgagactccgtctccaaaaaaaaaaaaaaaaaaaaaaaaggcaagcaacaagatagattgtacctgtgtctcagtaggaaattaagtaattcaaacatcaaatgattccaatttaaagctatggacatttaaataattctgagccttgagaggaatgtggtcatgcaaccagagtctagtggaatgcaggtgcaacttctaggagttttcctggctgactgtcatggctcaagcctgtaatcacaacactttgggaggccgaggcttccggatcacttgaggtcaggatttcaaaaccagcttggctagcgtggtgaaaccctgtctctactaaaaatagagagaaattacaggcgcctgccaccatgcccagctaatttttgtattaggcttagtgttagggtttctccccctccctcgggatgaagcttgttagctgacagagatggtcacctccattaccaagtagagccaggatgaactatgtgtgaccaagggcttttcaagtcctcttccctgaggactgattactgtttatcttgaaaacatgtccttaatgggttgtatagaacactgaagtttctttctctcttttcaacctcttagctgtttgcctctatttcccatcacattctggtctaaagcttatttattaatgaagtagtttttctttctttctctattatcgtcgtggagatgatttctcatttgggggaagactctttgtttttcaattatattttctcacatttaaaaagtgaagtaaagaatatttcctgggccaggcatggtgactcacgagtgtaatcccagcactttgggaggccgaggctggcggatcacttgaagtcagggttctagaccagcctggccaacatggtgaaaccccgtctctaccaaaaatatgaaagttagctgggcatggtcgtgtgcgcttgtaataccagctactcgaaaggctgaggcagaagaatagcttcaacccaggaggcagaggctgcagtgagccacgatctcgcaactgcaccccagcatgggccacagagaaatactctgtctcaaaaataaaaggaaagaaaaaagtaaaaaaagagaaagtaatagatctctttcacaaatgtgctgggacaactaactggatatttacatggaaaagaataatattggatctctatgtcacaccatgaaaaattttatttaaaaacgggttaaaaaaaaaaaggctgggcggggtggatcacatctgtaatcctagcagtttgggaggctgaggtgggcggatcacaaggtcaggagatcaagaccatcctggctaacatggtgaaaccccatctctactaaaaatacaaaaaattagccgagcgtcgtggtgggcgcctgtagtcccagttactccaaaggctgaggcaggagaattgcgtgaacccgggaggcggagcttgcagtgagccaaaatcgtgccactgcactccagcctgggtgacagagcgagactccgtctcaaaaaaaaaaaaaaaaaaaaaaaaagagagaaaaggaaaagagcgagggagagacgagggagggagccctgcgggagggggtgttactttgtcacccaggctggcctggacccccaggttcagcgattctcccgccgctgcttcctgagtagctgggacctcaggcttccgccccgtgcccgcatccctgctgtgtttaggcagcaggtggtgacctcactcctccctggcctgagcactccgtcccgcatcccaggcggaggccctagggaagtctctgaagctgagcacagggtggaccctccctcctgaatgaatggagaatagaaagggggaggatttctgttatgttctgtgggccatcagcatgaaatcgtatattccgccccggcagggctttgcatttcacattttagtttgcatgcccgttccagacaattccagggcttttgaatcatgcttcagccttcctggccgctctcacctccaaacaccgaaaaaaacaggcgctgggtgcgaggcggagggatgcacaggtcccgccccggccccgccctctgtcggttctaaagggcaaggtctctctgcctcgcgccccgcctctaccccgcccaggccccgccaaactgttcgccggccccgcccaggcctggcttcagtcctgggcgcgcaaaccccgaggcggatcgcgtggagtgaaggtcgtaccgcggcgcgtgagttttgctctgccttgtattaagtttgcgcttcccaggtccctggcgcgtctgtccctggaaagtggggtccccacggacctggaaattctcgcctgtcttccttcatccagagcaaattgagatgtccccgtaagagtccggaagttgcttgcttttgggtttgaactcgtccggaggctggtcccaaccccggtctttctgctatagggcagtgtatacacttcctgtcgcttagttttcctggtcaaaaccctgtgctgactccacccaccccgttctttttaaagtccccgacccgcgaggtggattcccgccctgggcgcctcccagcctctccgtcttcggcccctggagcgaagcgctgtgtccccagtcctggggaggctgcgtcttctgcctggtcctggaattctgcaggtgccacccttgtcttaaggcgccgtcgccccctacatcccccctcgtggtgggccctgctgctccccaattcttcccttcgcagtcaccgcttcccctgaaccagcgtagggcaggtcccagcggcttgtcctatgacaccgggtattcttgcctgcccagctccaccctccggaaaatgcgcttctccgcgatgcgggtgtcttaccccaaacccgcagagtggtgctggtggcaatgagaacagagggagaaacacagcagggaggacaccgggggatctggggtgctagagagtggggacaggggggcgtaacagggaagagagaatttaacagggagagcagaggagacgcagagataagaggcggtaatatgtagagattgaggacgatcaaaagattggggagaaggagcaacaagaggttaaataaggaccgggcgctttggctcatgcctgtaatcccagcagtttgggaagcttaggcgggcggatcacctgagatccggagttcgagaccagcctgaccaacatggagaaaccccatccctgctaaaaatacaaaactagctgggcgcggttgcatatgcctgtaatgtcagctattagggaggctgaggccagagaatcgcttgaacttgggaggcggaggttgcggtgagccgagatcgcaccattgcactccagcctgggcaacaagagtgaaactctttctcaaaaaaaaagcggttaaataagttgtgaggatggagcagaagaggtggaagaggagtaatagagggaagaaggggataaatagcaggagagtagaggggtacaaaatgaggagcacaatcccagggaaaaagaaaagaaaacaagagctagagagagaaggggagaatgagagatatgtacagaattagagagggaagcacagtaatgaagaaagaggggccaggtgcagtggctcatgcctgtaatcccagcactttaggagactgaggcagagggattgcttgagtccaggagttcaagaccagcctaggcaaaatagacaccccatctctttcaaaaagaaagaaaaaattaacggggcatgatagtgtgcagctgtaatttcagctactctgtaggcggaggctggaggatcacttgagcccaggagctccaggctgctgtgagcagagatcatgccactgtactccagcctggtcaaaagagcaagaccctgtctcaaaaaaaaaaaaaaaagggtgggggactttgggtacagatgagtgtgtgagttcattggatatgattagttgtgacatgttgacttctgtctataaaatctaataacttgtttaaattatacagatgagtttgagaattttaaatgtcctatctgtgagccatgtatgttctataaatattggtatcagaggttagcttccacttggaatccctattcagaccgagggcagtgacattcaattgtgggtcactcttcccttttcccatggtggggtaggaagtggtgggaaaaaaaaatcgctgttattacataatacttttaattaattaattaatattttgagatagggtctggctctgtcgctcagctggagtacaatggcgttatctactctaactgcagcctcgacctcttaggctcaagcgatcctccctcagtctcctgagtagctgagaccactggtgtgagacaccaagcccagctagtagttttttttttctttgtttgtttttttgtagaaacagggtttcagtatgtttcccggggtggtctcaaaatcctgggctcaaaggttcccccgtcttggccttgcaaagtactgggattacagggatgagccaccgcgcccggcctacatactaattattattattattattattagttttttgaggtggagtttcactcctgttgcccaggctggagtgcaatggcacaatcttggctaatgactctctgtgcctttagagttgaagcgattctcctgcgatactaccccctgagtatctgggattacaggcatgcgccaccatgccctgctaattttggattaggaggccgaggcaggagaatcacttgaacccaggaggcagaggttgtggtgagctgagatcgcaccattgtacttcagcgtgggcaataagagcgaaactctgtctcaaaaaaaccaaaaaagaatggagcaaaacaggagaggggcataaaatgagcagaagcccagggggaaatgcagaaaagaaacagatggagagagaaagtgagaaagggctatgcatagaatgatggagggaagcagtaatgaagacgaagagggaccctgggtgcagatgagtggtgagttgattggatgtgatgatgaagtgatgacatgttgttttctctgtttataaggtaacaaatttaaaattagtttaaattatacagatgagaatgagagttgccaaactcctgtgtctaagtgtggttcattttataatgatggcgtcagaggcagcttccctctgcaacccctcttcagccagaggacagtgacttgactcattcgttgtggatcaccctcttcccttttcatggctggggtcgggagtgggggagagaagtagggtaagaagtgactgactctgttactatatggaacgtgatgaaaggagtattaaaagtgcttttgttctctttttgtaattggtttccttttttctagttcctcttcatttcattttttttttttttttttttaatttttgagatggagtctctctgtgtcacgcaggctggagtggagtggagcagtcttgactcactgcaacctctgcctcctgggttcaaggaattctctgcctcagcctcccaagcagctgggattataggcacctgcagccacacctgtctgatttttgtatttttagtagagacagttttcaccatctaggcgggacttgtcttgcactcatgaccttgtgatccaccgccttggcctcccaaagtgctatgattacaggcgtgagccaccacacttggcctcagtaattgttttttattttttaattttagttttaatttacttatttttgttgtggtggtttttttttttttttttttttttttgacggagttttggtcttgttgcccagggtgaagtgcaatggtgcgatcttgctcactgcaacctttgcctctggggttcaagtgattctcctgcctcagcctcctgagtagttatgattacaggcacacaccaccatggccggctaattttgtattttcagtggagatggggtttctccatcttggtcaggctggtcttgaactcctgacctcaggtgatcctcccacctcagcctcccaaggtgctgggattacaggtatgagccgctgcgcccggcctttgttattgttttgagacacttttactgtttcccaggctggagtgcagtggcaggatcacagcactgtgcagcggcaacctcctgggctcaagtgattttcccacctcagcctccggagtagctggggccacagacacaccccaccaggtccggctaatgtttagatatatgtatttatttattgagactctctgtcacccactctggagtctagtggcacgacctcgtctcactgcaaactccgcctcctggggtcaagcgattttcctgcctcagcctcctgagtagctggagttacaggtgtgcaccactatgccctgctaatgtttgtatttttagtagagacatagtttctccatattggccaggctggtctcgaacccctaacattgtggtcttcctgccccggcctcccaaagtgctgggattataggcgtgagtcactatgcctgtcctcattgttttcaaagtatgatatattttcaaatatttctcctttggcccaagatttcattagatctgtattttttaaccattttaaaattgtttctctatgaaatttttttgagtttacattgaggtctgtgtgctttctagtctttatcatatatcgaaaacattttctactatgtgatatatgttgttaggttgtttcagtgtgtacttgataatgatatcaaggaccttttttctttaccctaacatgaaaattcagttgaagtagcctattccatttttttttcttatgtcatctgaaaaaatggtaatctgtgagcttctaagtaagtgtcccctcaattccctctggtccataatattctctacagatgttgaaggatgggctggattgacttggaaccttggtttagcagagcccatgtgttcttgagaaaagcatttgctcagatctcatttctacagctgcctctttttcagtgttttaaacatctattgctatgtgtgcacagttgtgtgtattttgaacatttttctgggagtgagtaatgatatgtttgggattgatgccatcagaaccttacaacttgaaagaagtttcgtttgctcaggtatataagatggtcctggaatttttgtttgtttgtttgtttttctttgagatggagtctcgctctgtcacccaggctggagtgcagtggcatgatctcagctcactgcaacctctacctcctgggttcaagcaattcttttgcctcagcctcctgagtagcagggactacaggcccccgccaccacgcctggctaatttgtgtatttttagtagagacgggatgtcaccatattggccaggatgatcttgaactcctgactttgtgatctgcccgcctcagcctcccaaactgctaggattacagatgtgatccaccccgcctggccttttttttttttttaaaccgtttttaaataaaatttttcatggtgtgacatagagatccaatattattcttttccatgtagatatctagttaggtattacaagggtgagtcaccgctcctgactggtctggaaattttctagaggaggaagaccaaggcagcctattggccctttcaggcaatcacatgggaatcagccacatgtccttcctcctcacctcagagcatctcagaataacttggtgaaatgtctcccactgtgagcctcagtgagcccacctgtaacatagaggtgaggaataagaccggaaaagctcagtcagagtgacactgacccctgaaatgactgacaaaatacagtgtgtgacttttcttctgggagaggtagtgctcagttttaactcgaattttaaagggattccagttctccaaatattaaaaaaaaaaaagcacaagatgattaaaatcaggggattagactcaaatcaccttgaaccttatcatctcacagctttaacccacttacacgactccatgtcccctgcaggcgtcgcccctgagctctacaatcctgtgtccagttgtctcagctgtctcctgggtcatcaaacaggcatccccaccttcaggtgtccacgagtggctttctaaacccccaaacacatttccttgcagtctgcacatctcagatgagagtgactgtgtacttctggaaacttagccaaacttgacagcatgtattttatatttgtgaaataaatcactttatttgtaagtgttgtaatttataatataaagagaaacttagatgtatacgtgaaaagagtgagaagatacatcacttccaatttttttttttttgagacgaattttcactcttgtggcccaggctggagtgcaatgccacgatctcagttcactgcaacttctgactcctgggatcaagggattctcctgcgtcagacacccgagtagctgggatcacagtcgactttcaaaatgcttttgggttgtgggagaaaaatgtttgaaaaccatgtccctatgggtctgtgcccccaggacctctctgacctcatctcctacctgtgccctcctctcttccactgctccagccccacgggtcgctttccttttcctggggctgaggttgctcctgtctcagggccctcacttgagctgtccctctctctaggatgctcttcccctcagctgcaagtgacaagcagcctttctttcctaggtccttgttctgatatcatcttctccgggtttcctttgtgatctcccacagcccccatttgacactgcagctgtgaaaccagaaaatcttacagagatctcagttatttagagagtttagtttgcccaaggtggtcggggcagagcttaattttatacattttatggagacatgagacatcaatcaatatatgtaagaagtacattggtttggtctgggaaggcgggacaactttaaacaaaggcaggaagacttgaagcagggaggcggcttttaggtcacagagaaatgaggcacaagtagttacaatcttttgagtttcctttttttttttgagatgaagtctcattttgtcgcccaggctggagtgcagtggcacgatctcgactcactgcaacctctgcctcctgggttcaagtgattctcctgcctcagcttcccaagtaggtgcccagatcttttttttggggggggggtggaggctttgatcagggatgagtctgtgccataaagggggcatcagtgcagcccaggtcccccctgctgcctcgtgtgtggcggcttctccatgaagggagtgagatctgaagaccggggtcaaacatacacttgtaggtcttcctgtgggactttcttacctctgcatgatctctggtgcagtgggcagtgggggacttctttctacagggtgacatctcccggttcatgtggttttgtcacaggaagggagtgagtcatttctaacatgaagtcttattttttttcacatacaggattgatttctaaagactcatgttacgtgaggaagcagctcagaagaggaaaggaaaggagtcaggcatggctcttcctcaggtgaagtgatattcctctgtggattaatctgtctctttcctttctgaaatgtagtagtattatattgtattgtagtaatgtattgtagcagccagtcttttctgagtctgaagcattttgcctgacacgttcacttgcactcacccatgcctgccctcagttcctctcaggtgctctgagattccatctcctgtgacccagtgacatgaacttgggaagaggctccactgggcatggtcttgggaagggctcacacccagacgtggataaacatggggtgtgggcccgttgatgtcagagctgctgggcagcctggattgttcaggggccacatctggatgtcagctcagagaaactacatatgaaatacgtatgttaatgtgcgcagatgtgtggtaaattctgggaaaggagacgaataagaggagatattttgtatctgatttggtaatgcatttgaagccacactagtagatcaagatgtctctgtgtccaaattttttttttttttttaagagacaagatgttggtcccagtgcagtggcttacacctgtaatcccagcattttgggaggccaaggcaggaagatcacttgaggtcaggacttagagaccagcctggctaacatggtgaaaccccatctctactaaaaatacaaaaattagctgcatgtggtggtgcatgcctgtaatctcagctactcaggaggctgaggtaggagaatcacttgagtccaggaggtggaggttactgtatgccgaaattgtgccactgcactccagcctgggagatggagcgagactctgtctcaaaagaaaaaagagagagagagaaggtgtcgctctgtggcttagttctggagtacaatggcacaattcagagtttacagcagcctcaaactcctgagctcaactaatcgctactgtagcctcccaaagagcctgaatgataggcatgggtcaccatatgtatgtgtgtatattatgtatgtatttatttattttaagatggagtctcagtcagcaaagctggagcgcagtggtacgatctcggctctctgcaacctccccctcccagtttcaagcaattcttctgcctcagcctaccaagttgctgggactacaggcatgcaccaccacacccagctaatttttgtatttttagttgagacggggtttcatcatgttcgttatgctgatctggaactcctgacctcatgatctgcctatctcggactccctaagtgctgaggttaaaggtgcacaccaccatgtcaggccttattttttatattgtatttttattttgttgtctaggctggagtgcagtggtgcaatcaaagcttgctttagccttgatatcctggcctcaagtgatcctcccctcttggtctcccaaattgctggcattccaaatgggagacagccagcttggctggactctgcacatttttgagatggagtgtcgctctgttgcccatgttggattgtagtggcggcatctcagctcactacaacctctgccttctggcttcaagcaattcttttgcctcagcctcctgagtatctgggattacaggcattcgctgtcacgcctggctaattattttgtatttttagtagagatggggtttcaccgtattggtcaggctggtcgaactactgaccttgtgatttgttcacctcggcctcccaaagttctgggatttacaggcctgagccactgcacttggctaaagtctgcacttttaatgactgtcaatgcaatggaaagtggagataggcatcagtggtacaggatgctttattacatcattgattttattttatttttaaatttgttttgagttgagtctctgttgtccaggcaggagtgcagtggggtgattttgtttcactgtagcctctgactcccagattacagtgattctgttgcctcagcctctccagtagcttggattagaggtgggccaccacgtgggtaacgccatgatgtgatgtgtgtgcatgaatacatgggtggataagcccatggtttatgtagaaaacacaacatttgcaataagttttattttttataataattgtaatgattttaagtatttttcattgttgtcaactatcacaataatgagttaatggtaagatggggccgggcccggttgctcacacctgtaatcccaccactatggaaggctgaggtgggtagctcatgacatcaggagttcaagaccatcctggctaagatggtgaaaccctgtcgctgctaaatatacaaaaattagatggatgtggtggcaggtgcctcaaatcctagctactggggaggctgaagcaagagaattgcttgaacctgggtggcacaggttgcagtgagctgagagattgtgccactgtattccagcctgtgcaatagagtgagactccatctggaaaaaaaaaaaaataagaagtattgggaaggattatatgtatgcctgtgtgtgtccattcagcgaccttgtaggatgctccgtgttcttaccctgggacctttgtcacattctctgcactagataaacccgtgtcagtttagtttaaagctgtatctgttacttcagcgtttatattcaaatgtgaatcccagacatctggattcagtgcttgtgttgacatttttagctatttgatttgtggtaattttcctagtatgtgtgatgcacttgtgtccaagtacagatctttcttcatgggacagtatgttattttatggcttaagacatgggaagcacttagaacagtgtatagcacatgggaagcattcaaaaatgttagtcatggctattgctgtcatcataacagttttttttttttttttggagacagagtattgctttgtcacccaggctgaagtgcagtggcatgatattgggtcattgcaacctctgcctcctgatttcaagcaattctccagcctcagcctcccaagtatcagggattacaggcacccaccaccacacccagctaatttttgtgtttttactagagaaggggtttcagcgtgttcccaggcgggtctcaaactcctgacctcatgatccacctgccttggcctcccaaagtgctgggattacaggcatgagccactgtgcctgaccgatcatgatagtttttagatttggacttttctttcaaagccaatggactctgtcctctctgaaacaccgcttgtatcttagttcatctagagactaaatatcgccttgtatgttgaacataatagctgacatgtctgtagagaaaaccctgtgtttgcttttttttttttttttttttgagatggaatcttgctctgttgccaagctaaagtgaagtggtgcgatctcggctcactgcaacctccgcctcctggattcaagcaattctcctgcctcagcctcttgagtagctgggagtacaggcctgcgccacaacacctagctaatttttgtattttcagtagagatgtggtttcgccatgttggccaggaaggtcttgatatcttgaccacattgtctacctgccttggtctcccaaaatgctaggattacaggcgagagccattgcctggaattgctttttttttttttttttttttttagatggagtgtcagtctgttgcccaggatggagggcagtggtgcgatcttggctcactgcagcctccatctcctgggttcaagtgattctcctgcctcagcctcctgtgtagctgggattacaggtgcctgccaccatgtccgtctaatttttatatttttagtagagacaggttttcaccacgttgaccaggctggtctcaaactcttgacctcaaataatctgcccaacttggcctcctgaagtgttgggattacaggcatgaaccacctcacccggccctgtgtttcctttttatttatatagtttttatattgtccataaaatcgagacttccatagtgacttatgggatcttaaaatctttcaaggaaaagtacaataaaatgcaactatacggaaaaaatagtcaaaaataccttaacatccttttgtcagaacacagtctttgatcaaataaatacttattttcccttttctcatttcctgtgaaggtgataactcaatcctccataatgttttgttgaaatgtatgtttcattttagggacgcttgactttcagggatgtggctatagaattctcattggcagagtggaaattcctgaaccctgcacagagggctttgtacagggaagtgatgttggagaactacaggaacctggaggctgtgggtgaggaaaatgtccctgcagacatgaggagtctgctcctgtctatcttggctcttcctggttttgtattctcttttgtgattttgccccatccatgctggttttttttttttttttttttgacatggagttttgctcttgtttcccaggctggagagcaatggtatatcggttcaccataacctccgccttccaggttcaagtgattctcctgcctgagcctcctgagtagctgggattacaggcatgcgccaccatgcccagctaattttgtatttttagtggacacagggtttctccatgttggtcaggctcgtctctaactccagacctcaggttatccgcccacctcaccctcccaaaatgctgggattacaggcgtgagccaccatgcccagctcattctggtttttgaggagcatcacagaagcgtctctcactggcactgtgacaacgttcatcccataaactaatgatcatcttctctaagcagcagtcagtggtgttgcaattcctcccagcgaggacatcattcgggctcacagcctcatatgtatgaggctcttgactgaactcttgttcatgtcacatttttcacaccaatatgtgtcactgttcatttttaacaagaaaacctatgttcagtttgttgtaggatcaaccctgtaagagatatggttttcatcaatcttattgagggagcttgtgaggttgaatgaggtttccatagtttagttctactgtcatttccttaagacacagtgcctttcaacttgttcatttctatgttgttgttgtttttttctcatagtcttgctctgttgcccaggcttgagtgcagtggcatgatcttggctcaccacaacctccaccttttgggttcaagtgattctcctgcctcagcctcttgagtggctgggattacaggcatgtgtcaccacacccgggtaatttttggtggttctattacagatggcagtttcaccatgttggccaggctggttttgatagcctggcctgatgtgattcagctgccttggattcccaaagtgctgggattacaggcatgagccacagcccctggcccatccgagttgtttttaaggctgaataatattccattgtatgtgtataccacattttcctcacatatttatctgtcgatgcacatctttactattataaataatactaccaggctgggtgcggtggctcacgcctgtaatcccagcaatttggaaggctgaggtgggtgaatcacctgaggtcaggagttcgagtccagcttggccaacttggtgaaaccacatttctattagaggtacagttttttttttgtttctgttttttttaagatggaatattgctctgtcacccaggctcaagtgcagtgcagtggtgtaatctcagctcactgtaacctccacatcccaggtcaagcaatctcatacctcacgcttctgagctgttgggattacacacatgcaccaccatgcccggctaatgttttgtattttttttagtagagacagtgtttcaccatgctggcctggccggtcttgaactcctgacctcctgatgcacccgctcatcctcccaatgtgctggtattacagacatgagccactgcactcagcctagctctgttttcacaaacacatctctacctactgtgccaggggatccttgttcacccccatggtctactgtactcttcatagagtttacttgtttgtttgtgtgtatgcctttctggtatctacacaggggatattgttgagtatattcttgaaactggaaatcagagtcacttaatttaaggatgtaaaactgctttcacctcaggccaccatactgctgcttttttggatctctttcattcttgtcccttgcccatattgtaatttgaatatttaaccttgggtcaatattttaacatttgctcaattagttccactttcgtccaagctcaagatttggtctatcctagtggaattatattcccacagaggtgcatgcacaaagtttactcctacatgcccattacttcctgctctccacccttgcccttcctttcctggccttgactcacatgatacattgatctggatgcaaatactgtttctttccagcctattgattttgtaatgctgaacaccccaatttccccgtgagcccctcccctccaacaccactctcactgagtaagtcaagaccttgttcatccactggacaaaattataggaggccgcttaaatcagtgtgtgcagggcatcatgactcagcacatgatccatgagggatggcttcagaaccactgtcagcagcgcagctcagcgcttgtgtcccagctcagcctttgtatcccccttgatgtacttctatctgttctccttgtattttctggtctggtcattttctgtactgcctgtgctgactattgtgcctaagaacatgtcgtgggatccttcatgcccaggattaagtcttgtccctcacttaccttatgtgcaaactggggtcatgtccatgaacactgtgggcctcctgtcattatttgagaaataatgataatttgcctccagggttggttttttttttttgtttttgagatggagttttgctcccgttgcccaggctgaagttcaattgcacaatctcagttcaccacaacctccacctcctggatttaagcgattctccttcctcagccttctgagtagctgggattagaggcatgcaccaccacacctgcctaattttgtatttttagtacagatggggtttccccatgttggctaggctggtctcaaactcctgacctcaagtgatctacctacctcagcctcccaaagtgctgggattacaggcatgaaccactgtgtccgggctatttttttttttttaatggagtttccctcttgttgcccaggctggagtgcaatggtgcaatcttggctcactgcaacctcgacttcctgggttcaagtgattgtcctgcctcaggctcccaagtagctgggattatgcctggcacaagcctggctaatttttgtatttttaggagagatggggtttctccatattggtcaggctggtcttgaactcccaacctcaggtgattcatccacctgctttttaaaacaagtgaatactattagatggcttcatataagttttatagtacattctcaacttcctttgtttaataagatttttcagccttcagtgatgttgatgatgagatgccccttttcctgcctcactcatctcactgttctgtcagaaatagcttagactggccagcttcagtggctttcacctctaattctagcactttgaaaggctgaggtgggtagatggcttgaggtcaggagtttgagaccagtcaggcaaacataatgaaaccttgaatctactaaattaaaaaaaattgggcatgatgactcatgcctataatcccaaacttttgggagggcgagacgggtggatcacctgaggtcagaagttcaagaccagcctggccaacgtggtgaaaccccgtctctagtaaaaatacaaaaattagctgggcgttttggtatgcacctgttatcccagcttcttgtgaggctgagacaggagagtcacttgaacctgggaggtggatggtgcagtgaaccatgatcatgccactgcacttcagccaaggtgacagagttagattccatttgccaccaaaaaaaaaaaaaaaagttagccaggcatggtggcatgtgtctgtactccctgcctagctgttagtccattcttagttcttaaaatgttgtatattttcttgacctcatacatcagaaggtagtgatcttaacatgtatttcagttcttatattgtgtgctggtggttaagtagaagttgtggcttttttcttcagaggaagttgtttagaattctgcgggctgtataaatgtacttatttgcttgctggttttatcatgggttacaatattttattaattaattttataattttacatatggcttttcggtatgtggtatgcaatataactgacacactgcactcgttaatgtcacaaagtgccaccaggtgcagtggctcacacctgtgatcccagaaatttgggaggtcaaggggggtggattacttaaggtcaggagtttgagaccagcctggccaacatggtgaaaccacatctctactaaaaacacaaaaattagccaggtgtagtggtgtgtgcctgtaatcccaggtactcaggaggttgaggaaggagaatcacttcaacccagcaggcagaggttgcagtgagctgagattacaccatgacgctccaagttggagtgcaagactccttctcaaaacaataaaaatggaaacaaatttttttttttttttgagatggagtctcactctgtcgcccaggctggagtgcagtggcatgatctcagatcactgcaaagtccacctcctgggttcataccattctcctgccacagcctcccgagtagctgggactgcaggcgcctgtcaccacgcctggctatttttttgtgtttttagtagaaacagagtttcaccgtgttatccaggatggtctcgatctcctgaccttgtgatccacccttctcggcctcccaaagtgctgggattacaggcatgagccaccgcacccggcccaaaaattttttcaaaagtcactaagtgcctgttctgtgtagatatatataattttatgacatttatttagaaaaatattgtactaacttttttcttttttttttttttctgtttgaggcagagtctactttgccaccctggcaggagtgcagtggtgtgatcttggctcactgcaacctctgcctcccgtgttgaagtgattcttgtgcctcagcctcctaagtagctgtgactacaggcacggaccatcacacctggctaatttttgtaatcttttcttatcttctcagtgctataattgtttgataatacagaatttccagtgcttttggttatccttacatgagcttgttgtggattatttaccaatatagtatgttgtgtggtttttttttttttttagcatttatttgtacacagtaaatatggtttaaatatgaagaatatatatttttctcttccttgatgtgacagtgatatgttttttgcaaattgtgatgcacttcaaggtcacagtggaaaaatactccttactttaggcttatacatatttgtgccctgtcagtgttttgtcatgatataggaaatagactttcatagaattgatttgaaggacatgtaattgccctttatttactaaagaatctcactctttttgtgttcctaaactttgaatatcatgtttgggaatttcaaaataagtattgttttttgtgtcatatttacacacttcagtatgatttaccatctgtacttaattggaaatgtattggtgtttatattttgtagatatctcttccaaacacatgatgaaggaggtcttgtcaacagggcaaggcaatagagaagtgatccacacagggacattgcaaagacatcaaagttatcacattggagacttttgcttccaggaaattgagaaagaaattcataacattgagtttcagtgtcaagaagatgaaagaaatggccatgaagcacccacgacaaaaataaaaaagttgactggtagcacagaccaacatgatcacaggcatgctggaaacaagcctattaaagatcagcttggatcaagcttttattcacatctgcctgaactccacatatttcagatcaaaggtgaaattgctaatcaacttgagaagtctaccagtgatgcttcctcagtttcaacatcccaaagaatttcctgtaggccccaaatccatatttctaataactatgggaataatcccctgaattcttcattactcccacaaaaacaggaagtacacatgagagaaaaatctttcccatgtaatgagagtggcaaagcctttaattgtagctcactcttaaggaaacaccagataccccatttaggagacaaacaatataaatgtgatgtatgtggcaagctctttaatcacaagcaataccttgcatgccatcgtagatgtcacactggagagaaaccttacaagtgtaaagagtgtggaaagtccttcagttacaagtcatcccttacatgccatcatagacttcatactggagtaaaaccttacaagtgtaatgagtgtggcaaggtctttcgtcaaaattcagcccttgtaattcataaggcaattcatactggagagaaaccttacaagtgtaatgaatgtggcaaggcttttaatcaacaatcacacctttcacgccatcaaagacttcatactggagtgaaaccttacaaatgtaagatttgtgagaaggcttttgcgtgtcattcctatctggcaaaccatactagaattcatagtggagagaaaacatacaagtgtaatgagtgtggtaaggcttttaatcatcaatcaagccttgcacgtcatcatatacttcatactggagagaaaccttacaaatgtgaagaatgtgacaaagttttcagtcagaaatcaacccttgagagacataagagaattcatactggagagaaaccatacaaatgtaaggtttgtgatacagctttcacgtgtaattcacagctggcacgacatagaagaattcacactggagagaaaacttacaagtgtaatgagtgtcgcaagaccttcagccgcaggtcatcccttctatgccatcgtagacttcatagtggtgaaaaaccttacaagtgtaatcagtgtggcaataccttccgtcaccgggcatcccttgtataccatcgtagacttcacactctagagaaatcttacaaatgtacggtttgtaacaaggttttcatgcgtaattcagtcctggctgtacatactagaattcacactgcaaagaaaccttacaagtgtaatgaatgtgggaaagcttttaatcaacaatcacatctttcacgtcatcgtagacttcatactggagagaaaccttacaaatgtgaagcatgtgacaaagtttttggtcagaaatcagctcttgagtcacataagagaattcatactggagagaaaccatacagatgtcaggtttgtgacacagctttcacgtggaattcacagctggcacgacatacaagaattcacactggagaaaaaacttacaagtgtaatgagtgtgggaagaccttcagttacaagtcatcacttgtatggcatcgtagacttcatggtggagagaaatcttacaaatgtaaggtttgtgacaaggctttcgtgtgtcgttcctatgtggcaaaacatactagaattcacagtggaatgaaaccttacaagtgtaatgagtgcagcaagaccttcagtaacaggtcatcccttgtatgccatcgtagaattcatagtggtgagaaaccttacaagtgtagtgagtgcagcaagacgttcagtcagaaggcaacccttctatgccatcgtagacttcatagtggtgagaaaccttacaagtgtaacgactgtggcaataccttccgtcactggtcatcccttgtataccatcgtagacttcatactggagagaaatcttacaaatgtacggtttgtgacaaggctttcgtgcgtaattcatacctggcaagacatattagaattcacactgcagagaaaccttacaagtgtaatgaatgtggaaaggcttttaatgaacaatcacacctttcacgtcatcatagaattcatactggagagaaaccttacaaatgtgaagcatgtgacaaagttttcagtcgcaaatcacaccttaaaagacataggataattcatactggagagaaaccttacaagtgtaatgagtgtggcaaagcctttagtgaccggtcaacacttattcaccatcaggcaattcatggtatagggaaatttgattaatataatgattgtcacaaagtcttcagtaacactacaacaattgcaaatcattggagaatccatgatgaagagaaatcttctgagtgtaataaatgtggcatgtttttcagacattgttcatacattgcagttcattggcaacctcatactggagagaaaccttacaaatgtcatgattgaggcaaggtcttcagtcaagcttcatcctatgcaaaacaggagaattcatacaggagagaaacctcacaagtgtgatgattgtggcaaagcctttacttcacattcacacctcgttggacatcagagaatccatactggacagaaatcttgcaaatgtcatcagtgtggcaaggtcttcagtccgaggtcactccttgcagaacatgagaaaattcatttttgagataactgttcccaatgcagtgagtatagcaaaccatcaagcattaattgacattggagtcaattcagcattgacttgagtttgtgttgacttaacattgagttcaagccttaattgacattcaagtgtttatgttaagaggatggggccaggtgtggtggctcaggcctgtaatcccagcacgttggaagaccaaggcacataggtcacttgaggtcagaagtttgaaaccaccatggccaacagatgtcggccactttcgccatcctgttttttgtttcttattttcttatttatttatttatttattttgagatggagtgtcactcttgttgcccagcctagagtgcaatgatgtgatctcagctcaccacaacctccgcctcccgggttcaagcgattcctctgcctcagcctccctagttgctgggattacaggcatgtgccaccacacccggctaattttttgtatttgtagtagagacggggtttctccatattaggctggtcttgaactcccaacctcaggtgatctgcccaccttggcatcccaaagtcctgggattacaggcatgagccaccgtacccggtcttgtttcttattttctattttttatttttttgagaggcaggagaatggcgggtgaacccaggaggtggagcttgcagtaagcccagatagcaccattgcaactccagcctgggagacagagtgagactccgtctattaaaaaaaaaaattataaataaaaaaatgtattttaaccagttagtctggttttcagtttcctttccttatgtcatttgttaaaatcttcagctgggagctatttattgcgtgtttctctcaaggccctctggaccattctggaaaaatgttgaaacatgggctggagtggcatagaatgctcctccaaaagcacccatgtattcttttgctttgtttgtttgtttttttttaaatggagtctcgctctgtcgccttggatggagtgcagtggtgcgatctcagctctgcaacctctgcctcccggcatcaagtgattctcctgcctcagtctcctgagtagctgaaattacaggcacctaccagcacacctggctaatttttatatttttagtagagacagggtttcaccatgtttgtcaggctggtctcaaactcctgacctcgtgatccgccagacctggcctcccaaggtgctgggattacaggcatgagccaccgtgccccgcctctttttttttttttgagatggagttttgctcttgttgttcaggctggagtgcaatggtgcgatctggtgtcactgcaacgtctgcctcccgggttcaaggcattctcctgcctcagcataccgagtagttgggattacaggtgccctccaccactcccggctaattttttgcattgttagtagagacagggttttaccatgtgggccaagctggtctcgaactcctgacttcaggcgatctgccgaccttgccctcccaaagtgctaggattacaggcgtgagccatcgtgcctgaagactcatgtattcttgattgaaataatttgcttatgtctcagttctacagttgaccttctttcactgttttcaaggtcaatagctgtgtgttcacacttctgcattttataaatgttactgtgattttcttgtaaggaagaattaactgtcgggaatcaatgtcatcagaatcttgcaaaagaagtttctttagcataggtatgcgtaagatgcttctctgattttcaaggatgtgggtgataagaccaacccctcccattagcccttccaggcccccatgtaagacttcacacacaccttctcactcatctcagaccttgtcagtgtaacttggtgaaaatgtgagcctccctgcaacttggcgatgaggggcttcaccagaaaagctcagcccgagtgactctgacccctgaaatgactggcaaaatggagtgcgcgtctaggtgtggctttttttttttttttttttttttttttgagggtaggagtgcccagttgtaattagaattttctttctttcttttttttttttttttgagacagagtctcgctctgttgcccaggctggagtgcagtggcgcaatctcggctcactgcaagctccgcctcctgggttcacgccattctcctgcctcagcctccggagtagctgggactacaggcgcccgccaccgcgccttgtatttttagtagaggcggggtttcaccctggtctcgatctcctgacctcgtgatccgcctgcctcggcctcccaaagtgctgggattacaggcgtgagccaccgcgcccggcatctgaactttgttttatttattttttttgagacagaatctcactctgtcacccaggctggagtgcagtggtgtgatctcggctcactgcaacttccacctcccaggttcaagcgattcttgtgcctcagcctcccgagtagctgggactataggcgtgtgccaccacgcccagctaatttttatatttttagtagagacagagtttcaccatattggccaggctggtcttgaactcctgacctcgtgatccgcccgcctcggcctcccaaagtgctgggattacaggcatgagccaccatgcctggcagcatctgaacttttaatgacttggaattgtggggaaaagagagagatcagactgttactgtgtctatgtagaaagaagtagacataagagactacattttgttctgtactaagaaaaattcttctgccttgagatgctgtgaatctgtaaccctagccccaaccctgtgctggcagaaacatgtgctgtgtcaactcaaggttaaatggattaagggctgttcaggatgtgctttgttaaacaaatgctagaagacagcgtgcttgttaaaagtcatcaccactccttactctcaagtacccagggacacagaacactgcgaaaggccgcaggaacctctgcctaggaaagccaggtattgtccaaagtttctcccatgtgatagcctgagatatggcctcatgggaagggaaagacctgaccatcccccagcccaacacccgtaaagggtctgtgctgaggaggattagtaaaagaggaaggcctctttgcagttgaggtaagaggaaggcatctgtctcctgctggtccctggacaatggaatgtctcggtgtaaagcccaattgtatattccatctactgagataggagaaaactgccttagagctggaggtgagacatgctggaggcagtactgctctttaaggcattgagatgtttatgtatatgcacatcaaaagcacagcactttttcctttaccttgtttatgacagagacatttgttcaggttttcctgctgaccctctctccactattaccttattgtcctgccacatccccctctccgagatggtagagataatgatcaataaatactgagggaactcagaggccggtgcaggcgcgggtcctctgtatgctgagtgctggtcctgtaggcctacttttctttctctgtactttgtctctatgtctctttcttttctcaaatctctccgttccacctgacgagaaatgcccacaggtgtggaggggcaggccaccccttcaggaatggaatggaaagtgaagatacacgtcagtggtacagggtgctttatcacatcattgattttattatttttttctttttttgagttgagtctccctctatcacccaggatggagtgcagtggtgagattttggctcactgtagcttccaccttccagattacagtgattctgttgcctgagcctctcgagtagctgggattagagatgcacgccaccacgcttgtaacggcatgatgtgatgtgtgtgcatgaatacatggatggataagcccatggtttatgtagaaaacacttgatttgcaataaggtatattttttatagttgttatgattgtaagtatttttcatttttgttaactatcacaatgatgagttattagtaaggattggccgggtgaggtggctcacgcctgtaatcccagcactttgggaggcccaggtgggtgaatcacaaggtcaggagtttgagatcagcctgggcaaaatggtgaaatgccatctcaactaaaaattagccaggcctggtggcaggtgactgtaatgccagctactcgggaggctgaggtaagagaattgcttgaacctgggtggaagaagttgcagtgagccaagattgtgccactgcactcctgcctgggtgatagagtgacactccttctcaaaaaaaaaaaaattaaaaaacgtcataattattaatattattattattacaggcatgagccactgtgcttggcctgcctctgttttcacagacacatctcttcatactcagccaagggatccttcttcacatccatggtctctacattgctgtactcctcgtagactttactcattttttttgtgtgtatgaaattctggaatctacacaaggcatatttttgagtatatgcttgaaactagaaatcagaggccattttacctaagagatgtaaaactgctttcacctcaggccaccatactgctgattttttggatcttgttcattcttgtcccttgcccatattgtaatttgcatagttaaccttgggtcagtattttaccatttgctaaattagttccattttcctccaagctcaaaacttggtctatcccagtggaattatattcccacagatgtgcatgcacaaagttcactcctacgtgcccattcctgccctccacccttgccctccttttcctggccttgcttcacatggtacattgatttggatgcaaaatactgttgctttccagcctattgattttgtaatagtgaacaccccaatttccccatgagcccctcccctccaacactactctcactgagtaagtcaagaccttattcatccactggacaaaattataggaggccgcttaaatcagtgtgtgcagggcatcatgactcagcacatgatccatgagggatggcttcagaaccactgtcagcagcgcagctcagcgcttgtgtcccagctcagcccttgtatcccccttgatgtacttctatctgttctctctctctctctctctctctctctctctctctctctctctctctctctctctatatatatatatatatatatatatatacactttttttattatactttaagttctagggtacatgtgcacaacgtgcaggtttgttacacatgtatacatgttccatgttggtgtgctgcacccattaattcatcatacttctttctgttcttgtattttctgtgactggtcattttctgtactttcttggcagactactgtgcttaaaaacatgggatccttcaggcccatgatcaagtttgtccctcacttagcgtatgtgcaaattggggtcatgtacatgaacacactggcctgctgtacttatttgagaaataatgttaatttgcctccagatttttttttttttttgagacggagtttcgttcttgtttcccaggctggagtgcaatggcgcaatctcggctcaccgcaacctctgcctcccaggttcaagcgattctcctgcctgaggctcccaagtagctgggattacaggcgtgtaccaccacacccagctaattttgtatttgtattagagatggtgtttttccatgttagtcagactgctctcaagctcccgacctcaggagatccacccgcctcggtctcccaaagtgctggaattacaggcatgagccacggtgcctggctgcctccagggttttaaaacaaattaatgctattagatggcttcacatattgcaggttttatgctacaggctctaaacttcctttgtgtaataagatatgtcagccttccctgatgttgatgatggcatgctccttttcctgtctccctcatttcactgtcctgttagaaatagcttagactggctggccacagtggctaacacctctaatgccagcactttgggaggccaaggtgggtagatcacttgaggtccagagtttgagaccagtcaggtaatctcagcactttgggaggctgagactggtggatcacctgaggtcaggagtttgagagcagcctggccaacatggtgaaaccctttccctactaaaagtacaaaaattacctgggtgtggtgtaacatgcctgaaatctcagctgcatgggaggctgaggcagtaggatcatttgatccctggaggtggaggttgcagtgagccaagatcatgccattgcactctagcctgggcaacaagagaaaaactccatctcaaaaataaagaaagaaagaaagaaaaaatataaataaaagcaccagtcttattcatatgtagtcaacacccatgaccaaattctctcaaaggccccatctgcaggaacatccaattggagaataagaactctgaacatggcttttggccaatatgaacactcagaccagggagcctgcatcatattttttatgtttttattgtgcaatttgttttataaaatgttttctctgatcccagtttataaattttcccagtatacagtctgtgttttatatttcatgcatagtgaactacataactaagggcaatgcatgtacatagaattgctgtattgcctggctgttatataactgtagttgtgatatcataattgaaccctctgacactgttagtcaattctttttttttttggagacagagtcttgccctgttacccaggctggagtgcaatggcatgatctcggctcactgcaacctacgcctccttggttcaaatgattcttctgcctcaccctccagagtagctgggattacaggtgcctaccaccgtgcccagctaatttttttgtatttttagtagagatggggtttcaccatgttggccaggctggtctccaactcctgaccccgtgatctgccctcctctgccccccaaagtgctgggattacaggcctgaaccaccgcatcctgtcgttagtcaattcttactccttataatgctgtgtatttacttgaactcatacatcagaaggtagtgatcttaaatgtatttcagttcttatagtgtgtgctggtggtaagtagaagttgtggcttttttcttaagagggaattgtttagaggtctgctggctgtataaatgtacttattatttcgttgctagtcttatcatgggttacaatattttattaattaatttttatgattttacataaggcttttcagtaagtggtatgcctgggaaacatggtgagacccccgtttctgcaaaaaatacaaaaattagctgggaatgatggcacatgcctgcagtatcaactactgtggagtctgcagtgggaggatggcttgagcctgggaggtcaagactatagtgagctgtaatcatgctactgcactccagcatggttgacagagcaagatgctgtctaaaaaagaatacttattgtaaagtttgggtacaggaataatgaagtcattgatagtttatgaacaggctatggagttgatgcccaaaagaaataaacagtttgtaaatgaataacttattttgagttgtgacaagacaatgttgaaagtgatgcatgaagcggcaggcagaccatccacatcagttttacagaaaaaaagttaatcttgttcgtgctgcagtgaagagaacagcaaacaggagaaacaatagtcaggaattcaataatagcctggttaacatgatgaaaccccgtctctactaaaaatacaaagattagctgggcacagtggtgggcacctgtaatcccagctactcaagaggctgaggcagaagaattgcttgaacccgggaggcggaagtttcgatgagccgggatcctgccgttgcactccagcctgggcaacaagagcaaacctctgtctaaaacaaacaaacaaaaaggtctagccccctctcctcctttgtctgccatcatggtgtgtgcttgactccacttcttgtcatgtcttctcacaagactttcaggattaagcggtttctggccaacaaccaaaagtaaaatcgtccgatttcccagtggattcgaatgaaaactggcaataaaatcaggtccaactttaaaaggagacattggagaagaaccaagctgggtctataaggaattgcacgtgagatggcacacatatttatgctgtgtgagcatcataatcacgttacttaagctgaaaatgtcactaccatctggagacttggacatgttttattgggaatatatttttttctctctgaatctgttatgaacgcattggttgggtgggttcagtaataaacatgtgagacctttcatttcaaaaaaaaaattttaatgacataatagattacctaaatttctgttttgctttgttttgttttttgagatggagactccactcggttcagtggatcgcacctgttgtcctggcactttgggaggctgaggtgggaggattgcctgagaccaggagtttcctgggaatcttctcatcttccctaacccagttcatgaaagacccttggactttactgttagggaaaaaatctatataaaacaatatcagcagctgggagtgatggctcatgcctgtaatcccaacactctgagaggccaaggcaggtgaatcacctgaggttaggagttcaacaacagcctgaccaacatggagaaactgtctgtattaaaaatacaaaattaggcagggtgcgatggctcacacctgtaatcccagcactttgggaggccgaggcgggcggatcacgaggtcgggagattgagaccatcctggctaacacggtgaaaccccgtctctactaacaatacaaaaaatgagccaggcgctgtggcaggggcctatagtcccagctactcgggaggctgagcagggagaatggcgtgaaccctggaggcagatcttgcagtgagccgagatagcaccactgcactctggcctgggcgaaagagtgagactccgtctcaaaaaataaataaataaataaataaaaatacaaatacaaaattaggcgggcatggtggcacatgcctgtgtaatcccagcgactcaggaggctgaggcaggagaactgcttgaacttgggaggcggaggttgctgtgagccaagatcacgccaatgcacaccagcctgggcaacaagagcaaaactccatctgaaaaaataaaaaacaatatcagtgtgtcaaagcattatgtctgtcacaatacttgtgaaaggaaaatcaaaattactaaccaaagagaaaagtcaagctgggaactgtgttagacaaacctgcctcccattttattcctaaacaatatagctacaaggactaaaccaaaaatctacatactccactcacaaactgtgggcctcaagatctccaccccaaaatagttctgttgaatttcaccctggcaatgtaaactgagagcttatcttcacaggtgtaggaaagaacccatccctctgcacacctgagtcaaatgtctgtctgactacttcccctgacctattttttatgtaaaaattcagggtcactgagccagcctaaggcataagtgactattcctccaccctctctcacatataaattgtgtattcaatgaaaggttgatcaaagactcaaacaatgtgatcatttgttatctccctgtgacctggaagcccgcaattccagttatttcaccttcccagatcgaaccaaggtgtatcttatatgtattgattgatgtctcatgtcaccctaaatttgtaaattgcagcctgaacatcttgggcacacgtcatcaggacctcctgaggctgtgtcatgggtgcattttaaccttggcaaaatagatttctaaattcattgagacctagtagatacttttggatcacaagctcatgaacacagaaaagatcaagatagaataaggaaaaaatgagtataatggaaagcacaaatcagttccaaaatctcaactccttcatatttattcaccatagggaaatgctttacaactttgtgggattagagtccatttgtgaaagattttatatatatatatatagtttgttttgttttgttttttgagacggagtttcaatcttgttgcccaggctggagtgcaatggtgcgatctcggatcactgaaacctctgcctcccaggtactacggattctcctgtctcagcaccccaagtagctcagattacaggcatgcatcaccatgcccggctaattcttttgtatttagtagagactgggtttcattatgttagtcaggctggtcttgaattcctgacctcaggtgatccacctgcctcagcctcccaaagtgctgagattacaggtatgcgccactatgctgggccaaaagatatatttctagtattagattgaaataaaaacccattctatataactttagctaatttaaaacgcaaataatagataattacatagatacacaaaactttataatatttcacttagtattgctattactatgttcttggggcagaagctcagtctgtcagatacattacaaaaggatggtgtctccataattgtgcttaggactctggtgcataagtggataaactgttaaacaggatcctaggggagctagggtgacaaagttcaagtccattaaaactagcaacatacattccttactgctcacgcatgactcatggtcttaagatgtttacagttaagaaaagcagcttaatcatacctgcaaggacaaactcctacataaacacaatgtccagatgacccaatatcccatgacaatgtatgcttctaagctaattacagtcatgctttcacgtacttgcacactaaaataccaaggataggtgtttttttttttttgatggagcttcacttttgtcatccaggctggagtgcaataggacaatctcggctcattgcaacttccaccttccgggttcaagcgattctcctgcctcagcctcctgagtagctaggattacaggcatgcaccaccacccccggctaatcgttgaattttcagtagagacggggtttcatcacgttcgcaaggctggtctcgaacccctgatctcaggtgatgcccccacgtcggccttccaaagtgccagaattacaggcgggagccaatgcaaccggccaaggatagctttaaatcaacaaagtaataagttttgttacactgtcagcccactggcaggtagacataccttagtttttacctaagcacctatgtaagagaaactttaagagaaggcagttccctttgtttttgaggtcgccctactgtgtaactggtagttttcttttttttttctttttttttttaagacggagtctcgctcaggcttgagacaccttgtccagctgtattttttattattattattattattattattattattattattattattattttgtttttgagactgagtttcactctagttccctgggctggagtacaatgtcatgatcatggctcaccacagcttccattttctgggctcaagcgattctcctgcctcagcctccggagtagctgggactacaggctcatgccaccactccaggctaatttttatatttgtagtagagacggggtttctctatattggtcaggctggtctcgaactcccgacctcaggccatccgccgtcctcagcctaccaaagggctgggattacaggcttgagccaccgcgcccggcctgaagtagaatattttagaaagtaattaaaccttttttcagcataataacccagagatgtacttctgaaggacttagaatctcttcttgaaaggcaagcaacaagggagatagtacctgtaagtcagtaggaaattaaatatttcaaacatcagctatttcaaatttaaagctacagacttttaaataattcggaaccttgagaggaacgtggtcatgcaacctgagtccggtggcatgcaggcgcaacttctacaagttttcctggccaggcatgcaggctcaggcctgtaatcccagcactctgggaggctgaggcgggcggatcgcctgacgtcaggaattagaaaccagcctggccaacatggggaaaccccgtctctactgaaaatacaaagccattagccgggcatggtggcgcacgcctgtattttcagctatttgggaggctgaggcaggagaactgcttgaacccaggacgtggaggtcgtagtgagccgagatcacatcactgcattccagcctgggcgacagagcaggacgccttcccaaaacaaaacaaaacaaaacaaaatgtgctatacaatttagtttcctaatatcaattttaaaaagttttcgtgtaaataattaggaaaactaagcagccccagagataagacctcctggcatcattgtcccttcttatggagtgataatgtaaccttccttgaagtgtatcactccatcaccagtcaagctgccgcagcctatgcactggacttgaatggaaaatgtggtggttctgggaaagcttctctgtatttccttgtgtgtgtgaaatgttaatgtctctacttgggaacgctgaccccattcatttggagttgaggtttccaggtggctattctcatgctttgtgtccaaataaactctataattaataatgtattctaaatttcattatttactgctgacatcagtttctgttggattgtaggagcctcaccagagagggcacctgtccgccatgctgtaaaactcacacttgccaaaaatacatgggttagggtttctccccctccctcaggatgatgctagttagctgacacagatggtcacctccattaccaagtagagccaggatgaattatgtgtgaccaagggtgttgtcaagtcctcttccctgaggactgatcagtgtttatcttgaaaacatgtatttgggttgtatagaacagtgaagtttctttctctcttttcaacctctcaactgtcctctatttcccatcacatgctggtctaaggcctatttattaataaaatagtttttatttctttctctgttatcgtcgtgaagatgatttctcatttaggggaagatttttttagttttcaattgtattttctcaacatttaagagcgaagtgaagagtatttcttgggccaggcacagtggttcacgcctgtaatcccagcatttcaggaggccgaggcaggcggatcacttgaagtcaggagttcgagaccagcctggccaacatggtgaaaccccgtctctacccaaaatacaaaaattagccgggcatggtggcctgtgcctgtaatgccagctattccggaggctgaggcaggagaatcgcttcaacccaggaggcagaggctgcagtgagccgagatgtcaccactgcactccagcctgagcgacagagaaatactccgtcttaaaaaaaaaaagaaaagaaaaaaaagaaagtaatagatctcttccacaaatgtgctgggacaattaactggatatccacatggaaaagaataatgttgtatccctatctcacacaatcaaaattttattttaaaaattaaaagagacgatgaggggagccctgcgggagggtgtgttactttgtcgcccaggctggcctggacccccaggctcagtgatcctcccgcctctggccctcaggctcccgcccacctggccgcattcctgctatgtttaagcagtaggtggtgacttcactcctccctggcctgaacactccgtcgcgcatcccaggcggaggccctagggaagtctctgaagctgagcacagggtggactctccctcctgagtgaatggagaatagaaagggagaggatttctgttctgttctgtgggccgtcagcatgaaattgtacgttccgcccaggcagggctttgcattttacattcttgtttgcatccccgttccagacaattccagggctttcgaatcgtgcttcagccttcctgaccgctctcgcctccaaagcccgaaaaatagagtcgctgggagcgaggctgagagacgcacaggtcccgccccggccccgccctctgccggttctaaagggcaaggtctctccgcctggggccccgcctctacctcgatcaggccccgcccaccttctcgttggctccacccaggcctggctttagtcctgtgcgcacacatccgcgcagaccaggaagcggatcccgtggagtgaaggtcgcaccgcggcggtgagttttgctctgtgttgtattaagtctgcactccccatatccccggcacttccgtacctgggacgtggggtcaccacagacctgtaaattctcgcccatcttccttcaaccagagcaaatgcagacgttcccctgggaatccggaagtcgcttccttttgtgtttaaagtcgccctgaggctgttcccgtctccagtctttctgctacagggcgctgtatacacttcctatcgcgtagtttctgtgctcaaaaccgttttttaactcctccctccccgcgcttttcaaagtcctcacccgagatgtgtatttccgcctgggcgcctcccagtctcaacctttaggcgcctgaagcgcaaacgtcgcgatcccagtctcagggaggccgagttctctgcctggtgctgggatcttgtggaccccaccgaaggcgtcgtcgcaccccacctcccgcctcatgctgggccttgctgcaccccaagtctccccttagcagtcaccactttccttgagccagcgttggggaggtgccaggggccagtcctgtgacacggtgtgttcttgcctgcctagctccaacccctgaaaaatgagcctctctgggatgcaggcgtcttacttcaaaccctcctgtgattgtgtgggctaaagagatcaggagacagagagtagtagaaaacctgagacagagaaaagaagaatgagaaagacccataacagatggcaaagtagaggatgggtgagggatttgccaagagacagcaaaagtgaaaaaaaaaagataagaaagcaggaggagaaaagcaactggagaaatgtagagaaaagctagatgtacagagagatgaaggacagacagcaaggtagagaggggcagcaaagagggaggctcatcagagtgagagagagagagagagagaggaggaatttggagccagggcagacagagcagagtggtgctggtggcaaggagaacagagggagaaccacagcagggaggacgcctggggatctggggtgctagagagtggggacggggggtaaaacagagaagagagaatttaacagggagagcggcagagatgcagagatgggataagaggcggaaatatatggagattgaggacgatcgaagaattggggagaaggagcaacaagagattaaataagacgtgaggatggagcccaggtaatttttgtatttttagtagagacggggtttcaccatgttggccaggctggtctcgaactcctgacctcaggtgatccacccgcctcgacctcccaaagtgttggaattacaggcgtgagccaccgcacctggccacccaagcattcttgattgaaaaagtttgcttatgtcttagttctacagctgaccctctttccctgctttttgtttgtttgtttgcttgtttgttttgagatgcactttcgctcttgttgcccaggctggagtgcaatggtgtgatcttgggtcaccgcaaccctttttggttttttttttgagacggagtttcgctcttgttgcccgtgctggagtgcaatggtgcgatctcggctcactgcaacctccacctcccgagttcaagcgagtctcctgcctcagcctccctagtagctgggattacaggcatgtgccaccacaccaggctaattttgtatttttagtagagatggggtttctccatattggtcaggttggtcttgaactcctgacctcaggtgatctgcccacctcggcttcccaaagtgctgggattataggcatgagccaccgagcccggcctactcaccaccacctttacctcccggttttaagcgattgtcctgcctcggccttcctgagtagctggaattacaggcaagtgccacaacatctagataatttttgtatttttagtagagatggggtttctccatgttggtcaggatggtctcgaactcccgacatcaggtgatccgcctgcctcggcctcccaaagtgctgggattacaggtgtgagccaccgcactcagcctccctgttttgaaggtaactagctgtgtctttgtacatctgcattttataaatgttactgtaattttcttgtgaggaagaattaaatgttgggaatcagtggcatcagaacttgcaaaggaagtttctttatcccaggtatgtgaaagaggcttctctaattttcaaggatagttttgataaggccaaccctttcctttatcccttccaggccaccatgtaagaattccgttacatcttttcactcatctcagaccttctcagcgtgactcggtgaaaatgtccccgttctgaggatgtcacagctaaatctaaagcagatcatgtcagtccctggcagggaaccctccatgggcttcctgtgttccccaggacaaaagcccaactcctcactgtcactccacagccctgtgtccagggcccctgccactgtccaggctcctcctgggaacttgccctcatctcatgactccctctgccccagtcacatttgcttttctcttttcccaaacatcaaaacccttcccgtctcaggtcattttcactgctcttaccctatttctctaaatgctcacagcactgtccctttctccttcaggtcctggctcagaaatgtctcccatgccctcccacccccaactgaatttccctctgcccatcagtctctatcacattactcaggttttattatctctgtgtcagtcacatcagaaacacactttttttctttttccaaagagtctcgctctgtcctccaggctgtgagtgcagtcttgtgatcttggctcactgcaacctttgtctcctgagttcaagcaattcttgtgccttagtctcccaagtagctgagattacaggtgtgtgccaccatactctgctaatttttgtatttgtattttattttatttttgagtcttactctgttgccctggctggagtccagtggtgcgatcttggctcactgcaacctccaccttccaggttcaagcgatcctccaacctcagcctcccgagtagctgggcttaccaatgcccaccaagcccagctactttttgtatttttagtagatatggggtttcaccatgttggccaggctgctgttgaactcctgaacttgagtaatcctcccacctcagccttccagagtgctagtattacaggcatgaaccaccgcacccagccccaatttttgtgtttttagtacagacaggttttcaccatggtggccaggctggtctcaaactcctgagctctactgatcctccccctcagcttcctaagtagctgggaccagagacacacagacgtgcaccaccatacctggctaagtttttgtatttttggtagagatggggtttcaccatgttgcccaggctggtctcaaactcctgagctcaagcgatgtacccaccttggcttcccagagcggtgggatgacaggcatgagccaccgcaccgagcctctgcatgggatttggtcagggctgggtctgtgccctgaaagggagctcattccagcccagctccccactgctgcagcgtgtgagggcttctccaggagggaagcgagagttttcttatagaaatttattatccctggtgcagtgggcagcagaggtgaccatattttttcagagtgagggcacctttgtatgtgtcattgtgttacaggcaggaggtgtgttgattctgagcagtaaacaacatatttctaacattcaggattgacttctaaagacttggtacgtgaggaaaaaacacggaagaggaagaggaaagcaaaggagtcagggatggctcttcttcaggtgagatgatattctcgggggattgttctgtctccttcctttcagaaatgctgatcttggagttgggaatcttctctgagtctcaagtgtcctgcctgacaggtttgctcacactcaactcatgccttccctcagtccctgtcatctcacttagattccatctcttgtgactgagtgacatgaacttgggaagaggctgcactgggcatggtcctgggaagggctcacacccagacatgtatggagatggggtgagggtcccgcagtgtcagtgctgttgggcagcagggattgttcaggggccacatctggatgcactgtcaactctctgtggaccaggattagagcagctgccaatggaagtgacctattaatgtgcacaaagtacgtggtaaattctagaaaaggagaccaataagggaaaatcttttctccctaattttataccacatttttaggtaattgagtgagttactgtgtttctgactcaaaaaattgtactaattagaatggaaagttcataaacagacatgaatgatacaggggttttattccatccttatttaaagaatatgaaatcaacctaaataatagcaggagatttattaaaccattcttagcaaattaagctgatggagacagtggtgttactgtggagaggcttttgaaacaggtgttttttgtaaaaatggttacaatttttctcaaatatgggagcagtacttgcagctgccaaattatccttttccaccaagatgagattcctcttcagttaaacaaaatttgcatatatatatatatttgtgtttgtttgtttgttttttcgagacggagtctcgctctgttgcccaggctgtagtgcagtggcacgatctccgctcactggaagctccgcctcccaggtttacaccattctcctgcctcagcctcctgagtagctgggactacaggcaccccccaccacgcccggataatttttgtattttttagtagagacggggtttcaccgtgttagccaggatggtctcgatctcctgaccttgtgatccacccgcctcagccccccaaagtgctgggattacaggcatgagccactgtgcctggcctactttttgtatttttaaaacctttatatatatacacacaaccccatacatatacacacacatatatacatacacatacatatatacacacacacatatgtatatattttgaaaatctgagacaaatgacaacactttgtattaacgtggttttttgtgagtgtgtgtaggttttattttttttttaacatatacaaaatagaattttgtacttcgattaattttattttcatgtattttattttattttgagagagagtcttgctttgttgcccaggctagaatgccttggtgcaatcgcagctcactgaaacctccaccatcaaggtcaagccgtcctcccacctcagccttccaagtagttgggacaacagatgcctgccaccatacccggctaattatttatttctaacgtaagcaattcatactgagagggtatcctgagctcttcagaaagtataatcaaacaccactgggaagacatcatgtggtgaagaatcccttacttggatttgtcggaacattctctgcaattaaatccatgctttcccctctcctcttctcattttctgtaaagataagatctcctcccataaccatttgcttaaaatgtgttttcctttcagggtctactgacattcagggatgtggccatagaattctctcaggaggagtggaaatgcctggaccctgctcagaggactctatacagagacgtgatgctggagaattataggaacctggtctccctgggtgaggataacttccctccagaagtggggatgtgcccttgtggatctttgtattttctcttgttgcctcttgggagccacatccttgcttggctaaaatggaagccgtattgagttagaaatgaaaagcttcatgatgtagcatctggactttcactgtcccctttagatgttctgcattcttcatgatagctcagtgggggttccagaagtaaagtaagcataaaagcttatggcaggccaggcgtggtggctcacacctgtcatcacagcactttgggaggctgaggcgtgtggatcacttcaggtcaggagttcaagaccagcctggccaacatggagaaatcccgtctctactaaaaacacaaaaattagccgggcgtcgtggtgcatgcctgtaatcccagctcctagaaaggctgatgaaagagaatcgcttgatcccggcaggccaaggttccagtgactgagaacacaccactggactccagcctgggcaacagagcaagactctctctcaaaaaacaaaaaaacaaaaccttatggcagactttaatcatatccagtttcctgtttgcttttcctgtgctttcgattcagtagttcttggaagagagcttgatgtccacatattacatgttacagtgctctccaagcattcagaaggaggcagtcagtggagcaattagtaaaatattttcctagatccacctgtaatgtcttctttcctacagaaatatagggctgggactctacaaaagctccagcacgtcttagtactttctttttataagcaggagtctcatgctgatatgttatctccatgttggagcaagagaaagggccctggactgtggagagtgaagtgaaaatatcaaaaaactccagatgggtgggaatgtattataggtgtaaatgcaggtaagagctcagatgggcagagtggaagctccaccttcaaatagtgtgtggggaaactctgcaagtgggagaattctgttggaaaaggaaagtttcaatcctgagatctctgaaatgacatctttctttgcccccacttatccctctgctcttcctttctttctttttcttattttatgaaagagtctcactgtgttgcccaggctacagtgcagtgatacgatcttggctaacagcagcctccacctcccaggctcaaaggatttttgtgtcccagcttcctgagtagctgggactgtaggcgctcaccaccatgcccagctaatttttgtgtttttagtagagacagggtttcaccatgttggccagcctggtctcaaactcctgatctcaagtgatccacctgccttggcttcccaaagtgtggacctaagattacctaggtgccaaggcaagagactgaaggcacaaagtgtttcagtataataaagaaaatagttacaataagaagagtcataatacaaattagatacagagatgatcatggacaattatcaatcattagcttttaatattactctttgttgcattattaatataacctaggaataactggcaggtatagggtgaggtgctgaagggacatggtgagaagtgacctagaaggcaagaggtgagccctctgtcacacccgcataagggccgcttgaggggtccttggtcaagcggtaacaccagtgtctgggaaggcacccgttacttagcagaccgcgaaagggggtctcctttccttggaggagtcagggaacactctgctccaccagcttctcgtggaaggctggatagtatccaggcctgcccgcagtcatccggaggcctaaacccctccctgtggtgctgtgcttcaatggtcatgctccttgtctactttcatgctcctcccgtactcctggctcctctttgaagttcatagtagatagcggtagaaggaatagtgaaagtctttgatctttcttagaagtgcatagaagagccgggcgcagtggctcttgcctgtaatcccagcactttaggggtccaaggcgggcagatcaagaggtcaggagatcgagaccatcctggctaacatggtgaaaccccgtctctactaaaaatacaacaaattagctgggtgtggtggcgggcacttgtagtcccagctactcgggaggctgaggcaggagaatggcatgaacccgggaggcagagcttgcagtgagccgagatcgcaccactgcactccagcctgggcgacagagtgagactccgtctcaaaaaaaaaaaaaaaaaaaaaaaaagaagtgtatagaagaaaacgctaacgtatgctgccttctctctctgctttggctacctaaaaggcaagggccccttgtcctatgatcacgtgacttgcttcaccttatcaatcacttagaagattcaccctccttaccctgcccccttgtcttgtatgcaataaatatcagcgcacccagctgtttggggccactacctgtctccgcgtcttgatggtagtggtcccccaggcccagctgctttctctttatctctttgtcttatgtctttatttattacaatctctcatctccgcataagagaacacccgctaagcccgcagggctggaccctacaccaaagcgctgcgattacaggcgtgagccgccaagctcaactattgttattattttaaacagttttgtcttttagttctttgtaaacatgtaaatggtttaaacatgattccagtgtgaatataacaactacgttagcgtccatttcttttatttttgttgaaacggagtcttgctctgtcgcccaggctggagtgcagtggtgcgatctcggctcactgcaagctccacctcccgggttcacgccattctcctgcctcagcctcccgagtacctgggactacaggctcccgccaccgcgcctggctaatttttttgtatttttattagagacagggtttcaccgtggtctcaatctcctgacctcgtgatccacccgccttagcctcccaatgtgctgggattacagacgtgagccaccgcgccccgccgtgcccatttctttcagtaaacagaaatgaagtgtgttgtatagataaaataaaaaggcatgaaaaaaacactgtacatatatgttaccagaaatgcaacatacacagaaataattccgacaaaaataaaaaaagttctagaggagaagtagttttgggaagtggttattgttgcaggtatgttaaagatcttaaagttggccaggcgcggtggctcacgcctgtaatcccagcactttgggaggccaaggcgggtggatcacctgaggtcaggagttcaagaccagtctcaacatggagaaaccccgtctctactaaaaatacaaaattagccgggtgtggtggcgggcacttgtaatcccagctactcgcgaggctgaggcagaattgcttgaacctgggaggcgggggttgcagtgatccgagattgtgccattgcactccagcctgggcaacgagagcgaaactctgtctcaaaaaaaaaaaaaaaaaaaaaaaaatcttaaagttatagcataataatgaaacctaaaattttcataacctggccaggtgtagtggctcatgcctataatcccagtaatttgggaggctgaggtgggcagatcaccagaggtcaggtattcaaatccagcctagttaacatggtgaaacttcgtctctagtaaaattacaaaaattatccaggcacggtcgtgggtggcagtaatcccagctactcaggaggctgaggcacgagagttgcttgaacccgggaggtagaggttgcagtgagctgagatcgcaccgtcgcactccagcatgggagacagagtgagactccatctcaaaataaataaataaataaataaataaataaagtttcataacctgcaaaaactacttctcctctagaattattattattatttttttagatggagtctcgctctgtagcccaggctggagtgcagtggcacgatctcagctcactgcaagctccacctcccggggtcacaccattctcctgcctcagcctcccgagcagctggggctacaggcgcctgccaccacacccggctattttttattgtatttttagtagagatggggtttctctgtattagccaggatggtctcaatctcctgaccttgtgatccatccacctcggcctcccagagtgctgggattacaggcgtgagccaccgcgcccagcctttttagaaatttttatttttgtcagaattatttctgtgtatgttgcatttctgctaacgtatatatacagtgttttttcatgcctttttattttaaaaaatttagttctgaactgggattacaggtacccaccaccgtgcccagctaatgtttttgtatttttagtagatatggggttgcaccatgttggccaggctggtgtcgaacttctgacctcatgattcacctgcctcagacccccaaagtgctgggattacaggcatgtgccaccgtgcccggacattagtcaattcttattccttatagtgctgtgtatagttttgacctcatacatcagaaagtagtgaccttaacatgtatttcaattcttatgttgtgtactagtggtaagtacaagttgtggcttttttcttaatagggaattgtttacaattctgcaggctgcatacatgtacttattattttctggcttgttttatcaagccagaaaatatttatcaatattttattaactgatttttatgactttacctgtgagttttcagtatgtgatatgcaatataactgacacactccactcgttactgtcacaaagtgctgctgggcacagtggctcatgcctgtaatcccaggacttcgggaggctgagacatgtggatcacctgaggtcaggtgtttgagacaaacctggccaatatggtgaaaccccatctctactaaaaatataaaaattagccgggcatgatggtgcatgcctgtaatcccagctactcaggaggctgagcaaagagacttgcttgaacccaggaggcagaggctgcagtgagccaagatcatgccattgcactctgtccagtgacagagtgagactccatctcaaaaaaataaaaatacaaaatttttaaaaaaaagtcacaaagtgcctgttccacatggatatagataattttgtaacagttatttagaaaaatacggtgttaacatttttctttttgagaggtagtctcactctgccactcagggtggagtgcagtggcacaatctcagctcaccacaatcttggcctcgcgggttcaagcaattctccttccttagcctcccaagtagcttggattacaggtgcccaccaccacacctggctactttttgtatgtttagtagagaagaggttttgccatgttggccaggctggtctcgaactcctgacctcaggtgatttgcctgtctcggcctcctaaaatactgggattacaggcgtgaaccaccatgccctgccttgtttctttagagatggagtctcactttgtcacccaggctggagtgcagtggttcgatgttggcgcactgcaacctttgcctcttggcttaaagcaattcttgtgcatcagccgcttgagtagctgggactttataaaggcgtgggccaccacacctgcctaatttttgtaatattttcttatcttctcagtgctatgattctttgacaatacagaaattccattgattttgattatccttacaggagcttgttgtggattatttaccaaaatagtaccttgtctggttttttagcatttatttatttacactaagtaccctataaatatgaagaatatatatttttctcttctttgatgtgacagtgatacgtcttttgcaaagtgtgatacactttagggtcacagtagaaaaacactcctgactttaggcttacacatgtttgtgccctgtcagtgtttcgtcatgatattggaaataggcttccataaaaatgatttgaagcacatgcaatcaccctttatttattaaaggatcttactccttttgtgttcctaaactttgaagatcatgtttgggaagtttaaaataagtattgttttttatgtaatatttacacatttcagtattgtataacttccgtacttaatttgaaacctatttgtgtttatattttgtagatacctcttccaaatgcatgatgaagatgttctcatcaacaggacaaggcaatacagaagtggtccacacagggacattgcaaatacatgcaagtcatcacattggagatacttgcttccaggaaattgagaaagatattcatgactttgtgtttcagtggcaagaaaatgaaacaaatggccatgaagcactcatgacaaaaaccaaaaagttgatgagtagtacagagcgacatgatcaaaggcatgctggaaacaaacctattaaaaatgagcttggatcaagctttcattcgcatctgcctgaagtgcacatatttcaccccgaagggaaaattggtaatcaagttgagaaggctatcaacgatgctttctcagtttcagcatcccaacgaatttcctgtaggccaaaaactcgtatttctaataagtataggaataatttcctccagtcttcattactcacacaaaaacgggaagtacacacaagagaaaaatctttccaacgtaatgagagtggcaaagcctttaatggtagctcactcttaaaaaaacatcagataatccatttaggagacaaacagtataaatgtgatgtatgcggcaaggactttcatcagaagcgataccttgcatgccatagatgtcacactggtgagaatccttacacgtgtaatgagtgtggcaagacattcagtcacaattcagccctgttagttcacaaggcaattcatactggagagaaaccttacaagtgtaatgaatgtggcaaggtttttaatcaacaatcaaaccttgcacgtcatcatagagttcatactggagagaaaccttacaaatgtgaagaatgtgacaaagttttcagtcgcaaatcacaccttgaaagacataggagaattcacactggagagaaaccatacaaatgtaaggtttgtgacaaggctttcagacgtgattcacacctggcacaacatactgtaattcacactggagagaaaccttacaagtgtaatgagtgtggcaagacctttgttcaaaattcatctcttgtaatgcataaggtcattcatactggagagaaacgttacaagtgtaatgaatgtggcaaggtttttaatcacaaatcaaaccttgcatgtcatcgtagacttcatactggagagaaaccttacaagtgtaatgaatgtggcaaggtttttaatcgaaaatcaaaccttgaacgtcatcatagacttcatactggaaagaaatcttagaagtgtaaatttgcaaggtttttaggcaacagtcaaaccttgcatgtcatcatagactttatactggagagaaaccttacaaatgtgaagaatgtgacaaaagttttcaatttcaaatcactccttgaaatacataggagagttcatactggagagaaaccatacaaatgtaaggtttgtgacaaggatttcgggtgtgattcacacctggcccaacatactggaattcacactggaaaggaactgtacaagtgtaatgagtgtggcagagcctttggtggtcagtcaacacttactcaccatcaagcaatccatggtatagggaaacttgactaatgtaatgattgtcacaaagtcttcagtaatattacagccattgcaaaacattggagaatccataatgaaggaggtcttacaagtgtaataaatgtggcaagtttttcagacatcattcataacttgcagttcattggcgatcttatacaggagagaaatcttacaaatgtgatgattgtggcaaggtcttcagtcaagcttcatcttttgcaaaacgggagaattcatacaggagagaaacctcacaagtgtgatgattgtgagcaaagcctttacttcacgttcacaccacattagatatcagaggatccatactggacagaaatcttacaaacgtcctatgtgtggcaaggtcttcagtccgaggttactccttgcagaatatcataacgttcatttttgaggtaatagttacaaatgcggtgagcacagcaaaccatcaaggattgacagtagagtcaattcagaattgacttgagtttgagttgacttaaaacattcagttgaagcattaattgacattaaagtgtttatgttaagaggattgggccaggcgtgtggctcacgcctgtaaatccagcactttaggagcccaaggtggatagatcacttgaggtcatgagtttgagatcagcctggccaacagacgtgagtcacttttcccagcctgctttttgtttctttaacaaaaaccaataggggtttttataggtattgtgttgaatctgaatcacattggcttatataataacaatattgatttttccaaaccatcaatgtgggttgtatatatatgtttttaatcattttggttaatgtttgtagatttcaaggtgtgaaattctcagtttttttatgtttattcctaagtatttcttactttaagatctctagcaaatggaagtgttttttaattttcgtttaaattttttattgtttatggaaattcaattaatttttggtgctgctattgcattgtgcaaatccactgaatgtgttgattagttccagtagtattttggttgactcaggccccgcccacctcttcgcctcccgtctggcctgacccaggccccgcccacctcctcgggggtctccccgcgggtctggcttctgtactgtgctgattggcacagacccggaagctgatggcatggactgaaggttgccccgttgagtttgcgcttcccagttctctggtactgctataccggggacgtgggtgtctccacagacctggaaattccggcccctctttctcaactcagagcaaattgagacgtccgggtgggagtccgtgagtcttttccttttgagtttaaagtcgccctgaggctggtcccgtcccggtcttttctgcagtagggccgtgcagacacctcctgtagcgaaactttccttctcaaaacccttcccgacccgtcctcccgcctcgcgctgtttcaggtcctcaccagcgagttggactctcgccctgggctcctcatcggcgcctggagggcagcgctgcagccccactcccgggaaggccgcgtcctctgcctggtcctgggatcctgcagaccccacccctgtccgaaggcgccatcgcccaccacctccctcctcgtgccggccctgcttctccccagttccaaccccaggaaaacgtgcttctcctggaggcaaccctctttttccaccctcgccctgttgttcccggaaggcaggcctggaatgtgaagtttccaggtagatggatattaaacatagaattgaagaaaaaaaaaaaaaccccacaaagtaacaaaagaatgaagcggcgaaagcagaaatttactcaaccaagaaagcaccccacagggtgggggtgggcccaagcgagcgtctccagggccccatttacaaagtttttggaggttatttttttttgaggtccctatgggctaccccttatctggatgaagaatttggcccttggccaaggaaataactgaggtaaattggcctgaggccagagcagatgggtgccctatgcagatgaaggggtggccggtgcttggccttggccactcctgggctctttctctttccacctgcgacctggtggaagggggagggtgttagggagagtagcctttgatcctttgttactttgggtgggaagatggggtttttccttttagtctagttttggaaagttcgcgttaattggttttagattccctgcctccctagacccaggacccatgtggttttttttgtttttgtttttgtttttttgatggagatggggtcttactctgctgcgcaggccgaagagcggtgaccggatcacagctcactgcagcttcaacctcctgggctcaagggatcctcccacctcagcctgcagagtagctgggaccacagccgcgcgccaccacaccgcgccaatttttgtgttcttggtagagaccgggttttgccttgttgtctaggttgggctccaactgcagggctaaagcgatccaagagcatcagcctcccaaagtgctgggattacaggcttgagccaccatgcccgccttatttcttaatttaaaaaaaaaaatgtatatgtagactgaacgcggtggctcatgcctgtcatcccagcactttgtgaggccgattctcctctatccaggagacgggtttcaccattttgccaggtttgtctcaaactcctcggcttaactgatccgcttgctttggccttccaaagtgctaggattacaggagtgagccaccacacgtagccagtcctggcattttgtagaaggatggccaacgcagcctgttgacccttcctggccatcacatgaaaatcagcgactcttccttcttacaaaactcggagcttctcaggataacttggtgaaacgtcccccgctgtgaacctcagtgagcccacctgtaatatacaggtgagggagaagaccagaaaagctcagtcagagtgacactgacccctgaaatgatgggcacaatggagtgtgtggcttttcctgtaggacagggaggtatttagttgtagtttgaactttaaaggattccagtcctccgaaaaacaggattagactcaaatcaccttgaaccttatcatctcatggctttgacccacctacatggctccgtgtcccctgcaggcctcgccccggagctctacaatcctgtgtgcagttgtctccgcagctctctgctgggacatcaaacaggcatctccaccttcatgtgtctataagtgacttcctaaacccccaaacacattcccttacagtcctacacatctcagatgagggtgacagtgtacttctgggtgcttagctgaggttgacaccatgtattttaaatatggaaaataaattacattatttgtaagtgttgtaatttataatgtaaagagaaaattacatgtatacatgaaaggagtgagaaagtacatcatttccaaatttattttgaggtgtgggagaaaaatgtttcaaggcctcatccttagggatctgtgctcccgggacccctctgacttcatctcctgcctgtgtcctcctcactccctctgctccagccatacaggcctctttcctttttctgggactgaggttgctcctatctcagggacttctcctgggctgtccctctgcctaggactctctggcccctcaactgcaagtgacaagcagcctttcttccctaagtctttgttctgatattactttctctatggaaacctttgtgatctcccacagccccccacttgacattgcagcgccaccttcacccccacctctggtccatgttgcctgttctgtgtgattcttttagctccttcaccgttcactggatcctggtgagaacaagtccgtaagcggagagcagaatcagaaggtggggctgtgctgggctggcgccatctgagtggagctcaaccctgacttcacattacagttttcaggcattttgcaaatatatcttttgttctgttttatcaaagattgctattatcataggatgggacacaccctcaataatacaatggcactggtgattctcatctgtgtccagcattgaacatcaaggcagtttcctccatattgagaactgagatcagcctgtgatccacagggaggtgagggggctgtgctctgcatggggtttggttagggccagatctgtgtcctgaagatctgtgtcttgctgcatcgtgtgcgtggacttttccatcaggggagcaaaatccaaaaacaagtcaaaattacccttgtaggtcttcctgtgggatgtccttatgtctgcataatctctggtgcagtgggcagcagaggaccatctttgtccctggtgaggtctcccctgtgtgtgtgttttgtcacaggaaaggagggagtgatttctaaacactaaatctcagctgggtgcagtggctcacatctggaatcccagctctttgggagggttgggtgggcagatctcaaggtcaggagatcgagaccatcctggccaacatggtaaaaccccatctctagtaaaaatagaaaaattagctgggcctggcagcgcatgcctgtaatcccagctacttaagaggctgaggcaggagaatcactagaaccagggaggcagaggttgcagtgagctgaggtcatgccactgaaccacattcttgtgacagagctagacaccatctcaaaaaaaaaaaaaagaaaaattaaatctcatatttttttacacacaggattgatttccaaagactcatgctatgtaaggaagccaccaagaagggcaaagaaaaggagccagggacggctcttcctcaggtaaagtgatattcctcggtggattcttctgtctccttgttttcttaaataccaggtattgtggtagccagtcttctgtgattctgaagcgtcctaactcacaagtttgctcgcactcacccatgccttttctcagtccctctcatcttaaattccatctgcctctattgcccaggctggagttcactggagcaatctgggctcactgcaacctccacctcccagggtcaagcgattctcatgcctcagcctctcaagtatctgggattacaggtgtccaccaccaggcttggctaattttgtattttttgtagagacaggttttcaccctgttggccaggctggtctcaaacccctgacttcatgtaatctccttgacggtttttcactgttaccaagaataacacactggctgcctgtgagcatggtgacttcactgcagatatctggagaattcctgcaaaactgattacttctttttggatttgctatttcctcttttacatctgggaagattccatccagacccccagctgcagaggtgccctctctgactgagaacatgagaaatttctcactcttttaagcaaatcttactcctgtggtcttaccaccatgttcttttttgcattcggtgaaaatgaaagccctttttatttatattttctattccttgagagtctgagtagatgtcattaatcatggacttgtatatttaaaatagattttaatactttgctgagcatacttttcatgtgttttgagagctattttgtattctttagttctttatttttgccctggtgttttgttcacattatgcatttttttaggataaaacagaaacgttctttcacatgcctgctttttttttttttcttttaagacggagttttgctcttgtcacccaggctggagtgtaatggcacgatcttggctgactgcagcctccacctcccgggttcaagcagtttttctgcctcagcctcccgagtagctgggatgacaggcaggtgccaccactcccagctaagttttgtatttttaagagagatggtgtttcaccatgatggccataatttcttttggcttctgaaattagaaatttttggccattaatatcttccaacaggcttttctattcctttcttcctctcactgtcttctgggacttctggtactttaaaaaaatttttttgagatgaagtcttgctctgttgccaggctggagtgcagtggtgcaaactcagctcacctccagcctttgtcacctgggtttaagtgattctcttacctcagcttcacaagtagctgagattacaagtgcgcaccactacacctgcctaattgttatatttttcatacagacagggtttctctatgttggtcaggctggtctcgatctcccgacctcaggtgatccacccaccttggcctcccaaagtgcagggatttcaggcatgagccaccgtgcctggcctgttttttttattgtttttttttttttgagacagtcttgctctgttgcccaggctggagtacagtggggcgatctcagctcactgcaacctctgcctcccatgctcaagtgcttctcctgcctcagcctctagagtagctgggactacaggagctcaccaccacaaccagctaatctttgtattttcagtagagacagggttttgccataatgaccaggctgttctgcaaactcctgacctcaggtgatccacccacctcggctttcaagtcctggtgtgagccaccttgccagtcccctcttcactaatttttaatttacataatgaattctgattttgaacccatgtattgagtttttctacttagttactgtatgtttagccctagggtttctgtgtagttcttcataatttccatacgttggttgaccttctcattttcttcatgcattgcttttatgatttcttgaagctgtctcttaactcaatgagtttccaacattgtttgggttggaggtgatggggtctcactgtgtccctcaggctggaggacagtggtacaatcttgggtcactttatcctctgctctccaggctcaagcgatcctcccacctcagcctggcatgtatctgtggatgtgtcctctctaggtttttgcttataatctcctaactgaagttaatttaagtgtgtgtgggtgtgatttgtagtgtgtacaggagagcattaatggagaagcctatgattttttgtttgtttgttttttgagacagtctcattctgtcatcaggctaaagtgcagtggcgccatctaggctcacttcaacctccacctcctgatttcaaaagattctcctgcctcgccctgctgagtagctgggactacaggcacgcaccaccatgcccagctaatttttgtatttttaatagagacggggttttaccatgttggccaggatgctcttgatttcttgacctcctgatccacccatctcggcctccataagtgctgggattataggtgtgagccaccacgcctggccaagcccatgttttatgtagaaaatacattattttcagtatatatatacatatattttattttgagagtctcactctgttgcccaggctggagtgcagtggtgcgatctcggcttacagcaacttctgcctccagagttctatcgatttttctgcctcagcttcccaaatagctgggattacaggcgctttcccccaccgtgcctagcaaatttttatatttttagtagatacaggttttcaccatgttggccaggttgttcttgaactcctgaccttaagtaatccacccaccttggtttcccaaagtgatgggattacaggtgtgagccccaatgcccggccatatatatatatagtttgtttgttttttgacagagtctaactctgcagcccaagctgagttgcagtggcacaatctcagctcactgcaaccttcgcctctggggctcaagcaattctcctgcctcagcctcccaagtacctgggattagaggtgggcaccaccacacctgtgttcaagcaattctcctgcctcagccttcaagtagctgggattacaggcaggtgccaccacgcccagctaagttttgtacttttagtagagatggggtttcaccatgttaccctggatggtctcaaactcctcaagtcaggtgatccacctgccttggcctcccaaagtactgggattccaggcctgaggcactgcacctggccatatattttttatattgtccataaaactgagacttccacagtgacttaggggattttaaaatctatcaaggaaaagtgcaataaaatgcaactatacagaaaaaactgttcaaaaataccttaatgcggctttgtcagaacaccgtcttggatcaaatcgatacttattttctcttttctcatttcatgtgaaggtgatgactcactcctccctaatgttttgttgaaatctgtctttcattttagggacactagactttcagggatgtggctatagatttctctttggaggagtggaaatgcctgaaccctgcacagagggctttatacagggaagtgatgttggagaactacaggaacctggagtttgtgggtgaggaaaatatccctccagacatgaggaatctgcccttgtctatcttggctcttcctggttttgtattctcttttgtgatgttgccccatacatgcttttcatgtacatgtcattgttttctacagtgatgaccctcatatttgtcatggacagcttcttagagactcccttatggagtggttttacataaaaccagaaaattcatgaagaacactttgactaataagattgaacatcatcctgctctaggcagagatgcccctggaggccctgagcggaattgtcaccatggcccaggatatgagatagaaagcatcacactgactgacaagtgtttccagctgcgcttgtggttttgtgttttttgtttcattttgtttttatgagacagagtgttgaacaggttggagtgcagtgtcgtgatctcagctcattgcaacctccaccttctgggctcaagcaattcacatacctgagcctcccaacctaactgaaattacagatgcatgtcaccatacctggctaattttgtattttttttatttttattttatttttattttttttattgatcattcttgggtgtttctcacagagggggatttggcagggtcacaggacaatagtggagggaaggtcagcagataaacaagtgaacaaaggtctctggttttcctaggcagaggaccctgcggccttccgcagtgtttgtgtccctgggtacctgagattagggagtggtgatgactcttaaggagcatgctgccttcaagcatctgtttaacaaagcacatcttgcaccacccttaatccattcaaccctgagtggatacagcacatgtttcagagagcacagggttgggggtaaggtcaccgataaacaggatcccaaggcagaagaatttttcttagtacagaacaaaatgaaaagtctcccatgtctacctctttctacacagacaccacaaccatccgatttctcaatcttttccccacctttcccccctttctattctacaaaaccgccattgtcatcatggcccgttctcaatgagctgttgggtacacctcccagacagggtggtggctgggcagaggggctcctcacttcccagtaggcgcggccgggcagaggcgcccctcacctcccggatggggcggctggcctggcggggggctgacccccccacctccctcccggagggagcggctggccgggcagaggggctcctcacttcccagtaggggcggctgggtagaggcgcccctcacctgccagatggggtggctggccgggcggggggctgacccccccacctccctccgggacgaggtggctgccgggaggagacgctcctcacttcccagacggggtggctgctgggcggaggggcttctcacttctcagacggggcggctgccgggcggaggggcttctcacttatcagacggggtggctgccaggcagagggtctcctcacttctcagacggggcggccgggcagagacgctcctcacatcccagacggggtggcagggcagaggtgctccccacatctcagacgatgggcggccgggcagagacgctcctcactttccagactggacagccaggcagaggggctcctcacatcccagacgatgggcggccaggcagagacgctcctcacttcccagatggggtggtggccgggcagaggctgcaatctcggcactttgggaggccaaggcaggcggctgggaggtggaggttgtagcgagccgagatcacgccactgcactccagcctgggcaccattgagcactgagtgaacgagactccgtctgcaatcccggcaccttgggaggccgaggctggcggatcactcccggttaggagctggagaccagcccggccaacacagcgaatccccgtctccaccaaaaaaatacgaaaaccagtcaggcgtggcggcgcgcgcctgcaatcacaggcactcagcaggctgaggcaggagaatcaggcagggaggttgcagtgagccaagatggcagcagtaccgtccagcttcggctcggcatcagagggagaccctggaaagagagggagagggagaccatggggagagggagagggagaggggactaattttgtatttttattagagatgggatatgaccatgttggccaggctggtcttgaactcctggtctcaagcaatccgcctgcctcagcctccatccaggtgttgggattataggcatgagccaccgcacctggccttttgttctgttttttttgttttttgttttttgttttgagacagagtttcactcttgttgcccaggctggagtgcaatggtgcgatctcggctcactgcaacccccacctcccaggttcaagcgattctcctgcttcaacctgcctagcagctgggattacaggcatgtgccaccaagcccggctatttctgtatttttaatagagacagggtttctccatgttggtcaggctggtctcgaactcccgacctcaggtgatctgcccaccttggcctcccaaagtgctgggattacaggcatgagccaccgcacctggcccgttctggtttttgaggagcatcacagaagcatctttcactggcactgtgacagtgttcatcacataaactaatgatcatcttctctaagcagcagtcactgctgtagaaattcctcctacggaggacatcattcaggctcactgcctcatatataggaggctcttgactgaactctttttttctggacatggaattttgctcttgttgcccaggctggagtgcaatggcatgatctccactcactgcaacctccgcctcctgggttcaagtgattctcctgccttggtttcccaagtagctggaattacagccgcccaccaccatgcctggcaaatttttgtatttttagtagagataaggtgttcttaaactttgaagatcacttttgggacgtttaaaataactgttgctttttgtgtaatatttacacatttcaatattaactattatttaccatctgtacttttttttttgagatggattattgctctgtcacccaggctggagtgcagtggcatgatctcgcctcactgcaagctctgcctccagggttcacgccattctcctgcctcagcctcccaagtagctaggactataggcacctatcactacacctggctaatttttttgtatttttagtacagatagggtttcaccatgttagcgaggatggtctcgagctcctgaccttgtgatccacctgcctcgtcctcccaaagtgctgggactacaggtgtgagccactgcacctggcctaccatctgtacttaattggaaacctattggtctttatattttttagatagctctttaaaatccatgatggagttctcatcaactgggcacggtaatacaggagaagtgattcacacagggacgttgcaaatacatgaaagtcatcacactggagatttttgcttcccagaaatcaagaaagatattcatcactttgagtttcagtggcaagaaatttaaagaaatggccatgaagcacccatgacagaaaccaaagagttgacaggtagtacagactgacgtgatcaaagacatgctggaaacaagcctattaaagatcagcttggatcaagctttcattcgcatctgcctgaactccacatgtttcagacccaagggaaaattggtaatcaagtggagaagtctatcaatgatgcttcctcagcttcaacatcccaaataatttgtaggctcaaaacccatatttctattaagtatgggaagaatttcctctattcttcattattcacacaaatacaagaagtacacatgagggaaaaacctttccaatgtaatgagtgtggcaaagcctttaatcatagctcatgtttaaggagacatcacgtaacccattcaggagagaaacagtataaatgtgatgtatgtggcaaagtctttcatcagaagcaataccttgcatggcaccatagtgttcatactggagaaaaaccttacaagtgtaatgagtgttccaagaccttcaatcagaagtcatcccttcagtgtcatcatagacttcatactgtacagaaacattacaaatgtgaagaatgcaacaaagtttagagttgaggatcacaacttgaaacacacaggagaattcatactggagaaaaaccatacaaacgtaaggtttgtgacaaggctttctgggataattcatgcctttcatgccgtaagagttcatactggagagaaatgttacacatgtaacgaatgtggcaaggcttttagtagaaaagcaaaccttgcacatcatggacttcatactggagggaaatcttacaaatgtaagggttgtgacaaggttttccaccatgatttatgccttgcacaacatcagagagttcatactggagagaaccttacacatttcacgagtatggaaagacctttgctcaaaattcagcccttgtaatgcataaggcaattcatactggaaagaaaccttacacatgtaatgaatgtggcaaggtttttagtagaaaagcacaccttgcatgtcatcatagacttcatactgtctaaggtttctaatcaacaatcaaaccttgcacaacatcagagagtttatactggagagaaaccttacaagtgtaatgagtggggcaaagccttaagtgggaagtcgtcacttttttatcatcaagcaatccatggtgtagggaaactttgcaaatgtaatgattgtcacaaagtcttcagtaatgctacaaccattgcaaatcactggagaatccataatgaagacagatcttacaagtgtaataaatgtggtaaaattttcagacatcgatcatatcttgcagtttatcagcgaactcatactggagagaaaccttacaaatatcatgactgtggcaaggtcttcagtcaagcttcatcctatgcaaaacataggagaattcatacaggagagaaacctcacaagtgtgatgattgtggcaaagtcttgacttcacgttcacacctcattagacatcagagaatccatactggacagaaatcttacaaatgtcttaagtgtggcaaggtcttcagtctgtgggcactccatgcagaacatcagaaaattcatttttgagataactgttccaaatacagtgactatagaagatcataaagctttaattgacattagagccaaataggcattgacttgagattgagttgacttaaccttgagtttaagaattaatttacattaaagtgtttatgttaagaagattgggccaggtggggtggctcatgcctgtaatcccagcactttgggagcccaaggctgatagatcacagccacacctggctatgagagtgtgtaggtggccgttggggtgggacctgattagaaggggcagggccttgaacagaatctgggcggggcaagaatgaggaggctgcctggaggccgggccagagggtgatcgtcatcttgagggcaaggtctggaagtggtgttttgaagggcagggtctcgagggggcgggtcctggctttctcctcagctggaccccaggtgtcgtctgctgtcatcctcttgccctgcaggactagattctccgggtactaattggtggatagtttctgatgtgccgtgatattacccctaatatcacagggatgcctcctgtccattttagagacttgctctgtcgcccaggctggagggcagtggcgcgatctcggctcattgcaagctccgcctcccgggttcatgccattctcctgcctcagcctcccgagtagctgggactacaggcgcccgccaccatgcctggctaattttttgtattttcagtagagacggggtttcactgtgttagccaggatggtctcgatctcctgacctcgtgatccgcccgcctcggcctcccaaagtgctgggattacaggcgcgagccaccgcgcccggcccctaagttaatatttcaaacaatcgaaggtaaaacaacatattgtgttgggccacctgtactgaacgctgaatcgtttttcctcttaagttgaaaatggttttaatgcaaagcgccttttttgagcaggtagagtcacgcatccggcaggcggggcgagctcccctctgtctggggcagggtgggggagaggggcagggacctcggtaaaggggtggagtggcgcgctggttgccgcgggcactggcaattagaagggattattaaactaagcaaggtcctgggttgtttgagtggataatggaaactgaaaggtgacgtgcaaaactgcctattactcccaggagtggaggataatttcatatttcatggaaataaactcagggcccggagcggtggctcacacctgtaatcccagcactttgagaggccaaggagggaggatcgcttaagcccaggaattcgaaatcagcctaggcaacatagtaagacctcatctctactaaaaataaaaaaaaacagccaggtgtgttagtccacacctgtggtcccagctgcttggggtgctgaggtgggaggatcacttgagccagaaagttggaggctgcagtgagctctgatcttgccaccacactccagcctgggtgaaaaagctagaccctgtctcaaacaagcaaataaatgagaggtataagtcctcctttaaaagtaaaggaagagatttttctttccttttgtctcttagaacattcaattagaaaatttgtaaattcattttctctgtcttctgaggtttttttttttagacagagtttttctcttgttacccaggcttgagtgcaagccacgatctcgcctcaccacaacctccgtctcccgagttcaagcgattctcctgcctcagcttcccgagtagctgggattacaggtatgaaccactatgcccggctaactttgttttttttttttagaaattaaaccttttttcagcttaatgacccaggggtgtatttttgaaggacttgggagctctctttgaaaggcaaacaacaagggaaacagtacctttatctcagtaggaaattaaataattcaaacatcaaataacttcaatttaaggctatggactttgagataattctgagccttgagaggaatgtggtcaggcaacctgagtccagtggaatgcaggtgcaacttctaagagttttcctgtaagtaattaagaagactaagtagccccagagataagacctcctcggatcattgtcccttcttatgtagtgataaagtaaccttccttgaagtgtatctatccgtaatcaatcaagttgctgcagcctatgcactggcccagaataaaaaacgtggtgattctgctaaagcttctctgtctttccctgtgtgtgaaatcttaacgtctctacttgggaacgctgatcccattcatttagagttgatgtttccacgtggctatttccaagctttgccttcaaataaattctgtacttaatcatatattctaaattttattatttactgctgacatcagtttctgtcggattgtaggagcctcaccagagagggcccctgtcgccatgttgtaaaactcacacttgccaaaagttgtgggttagggtttctccccctccctcaggatgacgctagttagctgacacagatggtcacctccattaccaagtagagtcaggatgaactatgtgtgactgttcaactatgtgtcctcttccctgaggactgattagtgtttatcttgaaaacatgtccttaatgggttgtatagaacactgaagcatctgatttcaaactcttagctcttttcctctatttcccatcacattctggtctaaggcttatttattaataaaatgatttttatttctttattatcgtggagatgatttttcatttgggggaagatcattttgttttcaaatatattgtctcaacatttaaatagtgaagtaaagagtatttcttgtgccaggcatggtggctcacgcctgtaatcacagcactctgggaggccaaggcaggcagatcacttcaagtcaggagtttgagaccagcctggccaacatggtgaaaccccatctctaccaattatacaaaaattagccggacatggtggcgcgcttgtaatgccagctattccggagggtgaggcaggagaatcacttcaacacagggtgtacaggctgcactgagccgagaccttgccactgcactccagcctggacgacagagaaatactctgtcttaaaaaaaaaaaaaggaaattaagaaagtaatagatctcctccacaaatgtgctgggacaactaacttgatattcacatggaaaagaataatgttggatccctacatcacacaatcaaaattttattttaaaaagttagagaacgaggaagggagccctgcgggagggggtgttactttgtcgcccaggctggtctggaaccccaggctcagcaaccctcccgctgctgcttcctgagtagctgggacctcaggctccctccccagtgcccgcatctctgctgtgtttaagcagcaggtggtgacttcgctcctccctggcctgagcactccgtcccgcatcccaggcggtggccctagggaagtctctgaagctgagcacagggtggactctgcccccaccgccgacccgccctccccgaccccgagtgaatggagaatagaaagggagaggatttctgttctgtcctgtgggccctcagtatgaaatcgtagttctgcccaggcaggactttgcatttcacattctagtttgcatccccgttccagacaattccagggcttttgactcatgcctcagccttcccggccagtctcccttccaaaacccgaaaaacggaggcgctgggctcaagactgactctgtcccgccccggccccgccctctgccggttctaaagggcaaagtctctccgcctcgcgccccgcttccgcctgcccaggccccgcccacctcctcctggaccccgcccaggcctggcttctgtcctgcgcgagcagatcagcgcgaacctggaagcggagagcgtggagtgaaggtcccacggcagcgcgtgagtttctctctgttttatattaagtctgtgcgtcccaggtccccggcgcgtctgtacctgggacgtggggtccccacagacctggaaattctcgcccgtcttcacccagagcaaattgagacttccctttgagagtccggggttcacttccttttgggtttaaaatcgccttgaagctggtgcggtctctggtcttgctgctatagggcaatgtatacactttgtattgggtagttttcctgctcaaaacctttttctaactcctcccgccccgcgctttttaaagtccttacaggtgaggtggattcccgccctgggcgcctcccaccctcgccttcgacggcccctcgagtgcagcgccgtgcccccagtcccgcggaggctgcgtcctctgcctggtcctgagatccttcagaccccaccattgtcttaaggcgccgtcgtcccccacctcccttctcgtgccgggccctgctgctccccaggtctcctctccgccgtcaccgcttcccctgagcccgcgttgggaaggtgtccggggcctgtcctgtgacacggggtgtccttgcctgcccagctccagcccctggaaaatgagctcccccgggatgcagacgtcttactccaaaccctcctgtaattgtatgggccaaaggaatcaggtgagagagagcagtagaaaacctgagataagaaaagagcaggaggagaaaagcaactggagaaatgtagagaaaagctagatgtacagagagatgaaggacagcaaggaagagagggggcagcaaagaggaaggctcatcagagtgagggagaggaggaggggtttggagccagggcagacagagcagagtggtgctggtggcaaggacagagggagaagcacagcagggaggactactgtgggtctagagtgccataaagtgtggacagggatgtataacagggaagagagaatgtaacagggagagcagaggaggcgcagagatgggagaagaggcggaatctatggaggttgaggacaatccaaagattgtgggagaaggagcaataagaggttaaataagtagcgaggatggagcagaaaaggtggaagagaagtaatagagggaagaaggggataaacagcagaagaggagaggggcaaaaatgaggcacggaagcccagggaaaaagacaagaaaacaagagctagagagagaaggggagaatgagagatatgtacagatttagcgagggaagcacagtaatgaagacagaggggctgggcgcagtagctcacgtctctaatcccagcactataggagactgagacaaggggattgcttgagtacaggagttcgagcaacataatgagacctccccatctctgaccaaaaaaaaaaaaaaaaaaaaaaattaaccgggcgtgatggtgcacagctgtaatcctagctactctggaggctgacgtaggaggataacttgagcccaggaggcccaggctgcagtgagccgagatcatgccactgcactccagcctggtcaacagagtgagacactgtctcaaaagaaaaaaaggagcgggggactttgggtaaagatgagtaggttagttcactggatatcattagtcgttgacttctttgtatataatctgataacttaaaacttgtttaaattatacagatgaggttgagaatttttaaactcctgtctatgagacatgtacctgtaaatcttagcatcagaggttagcttccacctgaaatccctattcagccaaacagcagtgacttattcagttgtgagtcactctcttgccttttcccagagttgggtaggaagtggagcagtgaagtgggaaaaaaaaaattggtgttattacataatacttttaatttaattaattaatatttgggatgggctctggctctgtagcccaggctcacgactgtaatcccagcactttgggtgaggctagtggatcacttcaggtcaggagtttgagaccagcctggccaacatgatgaaactccgtctctactaaaaatacaaaaattagccgagcatggtggtactcacctgaaatcccagatactagaaaggctgaggaaaaagaatcgcttgagcccaggagcagaaggttgcagtgagccaagagcctgccactgcactccagcccaggtgacagtgcgagactctgtttcaaaaagcaaaacaaaaccatctgggtgactttaaagataatccagttctggccaggcacgatggctcacgcctgtcatcccagcactttgggaggctgaggcaggcggatcaccagaggtcgggagttccagaacagccttaccaacatggagaaaccttgtttctactaaaaacacaaaattagccaggggtggtggggcatgactgtagtcccaactactcgagaggctgaggtgagagaagtcacttgaacccgggaggcggaggttgtggtgagttgagatcgcgccattgcactccaccttgggcaacaagagtgaaattccgtctaaaaaaaacaaaaagatatccatttccctgtttgctactcctgtgtttttgattcagtagttcttggacgagagctcgttgtccacatattacatatgactattctccctaagcattcagaaggaggcagtcagtggaggaaattgtgaaatattttgctagatccatctgtaatgttttctttcttactaaaacatagggctgcggctctagaaaagctccagcacgtcatcttcctttttttttttttttttttttttttttttttttaataagcaggagtctttctgacctgttatctccatgttggagtgagggaaggagccctggactgtggagaatgaagtgaaaataacaaaaaaaatacagatgggtaggaatgtattatgggtgtaaacacaaataggagctcagatgggcagagtggaagctccaccctcaaatctctctgcaagtgggagaattcggcgggaaaagaaaagtttaaatcctgagatctctgagtggacatctttctttgccccctcttatgtctctgttatttattttattttattttatttatttatttatttattttgagacagcgtctcactctgttgcatagactggagtgcagtggcacaatagctcactacgacctccaccacctgggttcaagtgattctcctgcctcagcctcccaagtagctggaactacaggcatgcatcaccaccatactaggctaatttctgcatttttggtagagacggggttgtgccatgttggccaggctggtctcgaactcctgacctcaggtgtttttcctgcctcggcctcccaaagtgctgaaattacaagtgtgagtcaccacgccaggcccctctgctctttagatgtgtagtagtttgatttttttgtcctctagtgatgctgcagctcagagacaaaggcagaatctttatcctgatgggcaacaccgtgtcatctggcttctgtgacctcattggtttcttgactctggaacagggagggctgtgtcaaaggggtctccttcccctgtggtctctcattctgtacttgactccttctgacgctccattctctgtccctatagataagatctgaggcctccatacacctaccccttgacctaccaggttccatcccatttcctgtacttggaacacctaatcaagagatcggaaaacctgggctgctcctcctttgcaaccggggcccgggatactgcacagagccctctctgcttgttcaaatagttggcttgcctatttgaagtaggaaaaaaaggccatgcgcggtggctcatgcctgtaatcccatcattttgagaggctgaggagggcggatcacttcaggtcgggagtttgagaccagcctggccaacatggtgaaactccgtctctactaaaaataccaaaagtagccgggtgtggtggtgggtgcctgtaatcccagctactcgggagactgaggcagaagaatctctcgaacccgggaggtggactctgcagtgagctgagattccgacactgcactttagcctgggcaacaaagaaagactccaccccccgccaaaaaaaagaaatacaaaaaaaaaaaaagtgtttttcctactctctcatgccactgagcacagaatgcctcagttctgatcaccaaaatttgtggatttctccccaaccacatcttggagtgcaatggtgtgatcttggctcaccacaaactctgtttcctgggttgagatgattctcctgcctcagcctcctgagtatctggcaaaagagcaagacctcatctcaaaataaaataaaatatgtgagaacaaaattactcaaagtacaaaaggctaatcagagactcaaagaaaacaaccatttgtctcttatttacctatgtcctggaatccaccccccaccccgctttgggttgttccacctttcccgacttaaccaacgtacatctgacacttactgatacgtcatgactccctaaaatgtaagctctacctagaccatattgggcacatgacattaggacctcttgagcctgtgtcgtgggcatgcagttaaccttggcaagataaactttctaaactgattgagatttgtctcagatacttcgttcacaaactatttttaaagtcccaggtaatttattttagcagctaaaagaaaaatcttggctggcacgttggctcatgcctgtaatcccagcaccttgggaggccaaggcggttggatcacaaggtcaggagttcaagatcatcctggccaacatggtgaaaccttgtctctactacaaatacaaaaattagtgggcatcttggcatgtgcctgtaatccccgctacctcagaggctgaggctggagaatcgcttgatccagggagtcatgggttgcagtgagccgagattgtgccacttcactctagcctggtgacagagaagactgtccaaaaaaaaaaaaaaaaaaaaaaaaaaaaaaaaaaaaagctggtttcaggggtttctggttacaacaggaagtttcagcagccatacttcagagaatcacgttcttgaagcaatgtttgtatcctgagttcatttttcatctgtcctcttgactttggtttagttgtgaggcagcctcattttctggggtaatacctgatgttcgttgtctcatggccacggaaatcgaggacacggacacccaagagtggcgttaagagtggaagttcaataggcgaaagaaagtcaatagctctctgctacagagagaggtcctggaaaaatggtttgcagattcgtggcaaaacgtaggggttttatagatgagctggtggggaggtagtgtcttatctacataggaccagatgtaacatttgcatacggcatgaatttctggcagccccctccccaatcttttattatgcaggttctttgcctgagctgtgccatgttacccatttctttcttactgtacacgtgctaacaaaaaaggaaagacggagcttccatggtggacatgcctagccccaaggtagccccttttctattggcacagctgctgacttcccccatgcaagcttccagcttgcttacgtatgtttgcagatcgatttttcgggctgctctttgttagaacaaaacgatattttgggcagctttttgttagaagggaagctctgcagaggagtttttgcccttactgtctgcctaaatagtttatttttacctcctgtataagttggatgtggcaagagtgacccaattgataagatgaacttttatcacggcagaattttaaattcactttacgtgcattctgcaagtaactagaaaagatactttttatttgcaaattataaggtgttttgtttgtttgtttgttgttatttgagacaatctcactgtgtcacccaggctggagtgcagtggtgcgatctcgactcactgcaactcccgcctcccaggttcaagcaattttcctgcttcaacctcctgagtagctgggattacaggtgtgggccaccatgcccggctaatttttgtatttttagtagaaacggcatttcgctatgttggccaggctggtcttgaactcctgtcctcaagtgatctgcctgcctcggcctcccaacgtgctgggattacaggcatgagccaccacacctggccaattataaggtattttattttttattatttttattattattttttgagacggagtctcagtctgtcacccaggctgcagtgcagtagcacgatcttgcctcactgcatcctccttctcctgggttccagcaattctcctgcctctgcctcccgagtagctgggattacagccataagccattactcccagctaagttttttttgtctttttagtagagatgggatttcaccatattggccagtctagtctttaactcctgacctggtgatctgcgtgccttggcctcccaaaatgctaggattataggcttgagccaccgcacccggccctgtaagttattttataccttttctttgtttttctttctgtcaggtgtggtaagaaaacctgtaacatagatagccttcagaatatatttggatttactgtggagtcctaattagggaaaaggagtctggctagtgggaacagggggaaagcaaagagataaggcaaataagctatttaaaaaactaaacattgagctaccatatcatccagcaagcccagtgctgggtatatatacccagcactaggctaaatacaagaaataaaagaaatcagtatattgtgtgtatacttatagacaatgaagtaatgttcagccgtcaaaaagtatggcatcctgtcatttccaacaacatggatgcaactggagagagatatatatatatataaatatatataatatataaaaaatatataatatatataaatatatattatatataaaaaatatatataatatatattatataaaatatatatgtaatatatattatatataaaatatataatacataaaatatatatgtaatatatattatatataaaatatataatacataaaatatatattatatatgtaatatatataatctatatataatatagattatatatatatattttttttttgctgagacagattctcgctgtgtcacccaggctagagtgcagcagtgcgatctctgctcactgcaacctccgcctcctgggttcaagcgattctcctgcctcagcctcccaagtagctgagactacaatggtgcacaaccacgcccagctaaattttgtgttatttttattcgtattccccatatttacttttatttcacagtactttttatatccttactctgtatgtatttttgctctatgtaaagtaaaatgcatgccatgtgttcatttggggcgtaagagaaaggcatttagaagaatacaagtcccacttatcaatagggatgcaggtttgtcagagtgtgaaactgcactgctatgggattttcatcatgttcatataagtatcctaaggccgactgcagagaggataactgaagtggaaggtgtgattgtatgttctcaaattgtatgatgtttaattccatcataaaaaaaattgtaggctgggcgtggtggctcatgcctgtaatcccagcactttgggaggctgaggcaggcggatcacgagctcaggagatcgagaccaacctggctaacacagtgaaaccccgtctctataaaaatacaaaaaaattagccgggcatggtgtggcgggcacctgtagtcccagctacttgggaggctgaggcaggagaatggtgtgaacccgggaggcggagcttgcagtgagccagagcttgcagtgagctgagatcctgccactgcactccagcctgggcaacaaagcgagactccttctaagaaaaaaaaaaattgtagctccttcagccttagcaacctgatggcacattgtttgtgtttagacatgaaggatcctatagaggtgagataaagctatgcaggtagatggaacataattaactcagttataaaaaaattaaatgttgttaacacatgacatctgtgatacattctaaataaaacaatagaaactgtagcctagccatcacagtaaaaccccatctctaccaaaaaatacaaaaattagctgggcatagtggtggtacacctgtagtcccatatactagggaggctgaagcaggagaactggttgaacccaggaagcggaggttgcagtgagccatgatcgctccattgcactccagcctgggtgacagagtgagacactgtctcaaaaaacaaacaatagagaatgtaatgctgacagtttaaaaggattcctaatcaaggacatgctattgtgggtttttttttttaaaataaactctcctttttggaccaggcacagtggctcacacctgtaatcccagcacttttgggaggccaagcagaaggatcacttgagctcaggagttcaaaaccagcctgggacacatagtgaaaccccgtctctacaaatagaaaaaaaaaagctaaaaatccctcttctctgtggtaactgctcttttcaagttcaagattaagagaaatttttcctcaatcttgctaaatgacagctactgccattcaatggagatgtggctaacatgtcccctgcattacctctactgtatatgtaatcacttcctattaacgtattaatctcctccaataaaaactgcagcctcttaaggtcttggactgctctatttcatgattggttagtagagcatttctttcctataatccacactggccctctctgtgaagaatgccctgtatgcaataatctgactgatatcacagctttacattattctcagccccctacaaatcttaattcagccattttttttcctttttttttttttttgagacagagtctcactcttgtccaggctggagtgaagtggcacaatctaggctcactgcaacctctgcctcacgggttcaagtgattctcctgcctcagcctctcttgtagctgggattacaagcatgcatcaccatgcccggcgcatttttgtattgttatagtagagatgcggtttcactttgttgcccaagctggtctcgaactcctgatctaaggtaatatacctgcctcagcctcccaaagtgttggaattacaggcgtgagccaccatgcctggcccattctggtttttgaggagcatcacagaagcacatacataggcaacaatctccgtctggttctgtttccttttctttgtgtttttctttctttttttttttttttttttgagatggagtctcgcctgtcacccaggctggagtgcagtggcatgatctcagctcactgcaagctctgcctcccagattcaagcaattctcctgcctcagtctcccgagtagctgggattacaggtgccagccacaatatctggccaatttttatatttttagtaaagatggggtttcaccatgctggccaggctggtctcgaactcctgacctcaagtgatccacccatctccgcctcccaaagtgctgggattagccaatattcagccagtaattaatttcaaaagatagtgtccctgtttcacaggaacatggagagaaatgatttcacctaatgaagtaggccattgtttcctattcctgcctatagatcatgaaatgactaagaaagacatcataaaaacatttcaaatgtcagcttgaaagtcaacattggtaaagaagtctttctccttcaataatataatacattatttcatgacctgaaagtaactggccatttccaaatgtccttgagtctttgatatatatgtcatgacttttaacatattttgaattgtaattattctgcagaatgtaatataaaagatttatggtagagaattagacttcctattggctgggcacggtggctcacgccagtaatcccagcactctgggaggctgaggcgggcggatcacgaggtcaggagatcaagaccatcctggctaacacggtgaaaccccgtctctactaaaaatacataaaattagccggacatggtggcgggcacctgtaatcgcagctactcgggaggctgaggcaggagaatggcatgaacccgggaggtagagcttgcagtgagccgagatctcgccactgcaccccagtctgggcaacagagtgagactccatctcaaaaacaataaccaaaaaaagagaattagacttcctgtgagctctcagatggattatagtttgtgaataatttaccatatcattacatttgtaatggattgttccactataatttttatttttattttttgagatggagtctcactctgttgcccaggctgaagtgcagtggcaggaccttggctcactgcaacctccgcctcccaggttcaagtgattctcctgcctcagcctcccaagtagctgggattacaggcacgcactaccacacctgggtaatttttgtatttttagtagagagggggtttcatcatgttggccaggccagtctcaaactcctgacctcatggtctgcctgcctcagcctcccaatgtgctgggattacaggcgtgagccaccatgcccgggctccactatgatttttttttttttttttgagacagaatctcgctctgtcgaccaggctggagtgcagtggtgtgatctcggctcactgcaacctctgcctgccgggttcaagtgactctcctgcctcggtctcccaagcagtgtggactacaggcgtgtgccaccacccccagctaatttttgaatttttagtagagacgggatttcaccatgttggttggctaggatggtctcaatctcttgacttcatgatccacctgcctcggtctcccaaagttctgggattacaggcatgagtcactgggtccggccctccactatgaatttttaatgaaccctgaggatgcatcttagattagtaacctttccagattcactacatttgcctggtttttattgagtggatctctcacgacaaaatcatgaatattacactgaaaggcttattacattatctttgtgtagttactctccagtataaaccctgtgatgttccggttttgatgcctgggtaaaagcttaagcatgcacgttacatttgtatggtttcatcaaaaaagtttttgatgcctagtgagactttggcctgcggaaaatctctatcacatataattattataaatgctctttagtatggattctctgatgttgatgaatgtttgaagtcataatggtttcccactctcagtgtttttgtttctctcaagcatgaatttttgcaatattgtacaatgtgagaattgtgccagaagaccttgccacattcattacatttgttaggtttctcaccagcaagaattctttgaagaatcctggtctcagattttaccttaagaccttgccacattcagtacattagtaaagtttctgtcctctatggtctagctaacggttattaagccttgaacaaaaactaaaggctctgctacattcattatacttgcaaagtttttctccagtataaattattgtatgtcttacaaggctttaatgctaactgaacactctgccacattaattacatgtgttagatttctttccggcatgaaatctctgatgacgtacaagatatgaattgtcgcggaagagtttgccacattcattacatttgaaatgtttctctccagtgtggatcgcatgatgattagtgaggcttgaacgcatactaaaagctttgccacattcattacatttgaaaggtttctctccagtgtgaattttccgatgatgtgctagggatgagtttagaccgaagaccttcccacattcattacatttataagctttttctccagtatgaattctccaatgatatgcaaggtatgaattttgactgaagactttgccacattcatcacatttgtaaggtttctctccagtatggattctgtgatgttgtacaagatgtgaattttgactgaatgctttgtcacattcatcacacttataaggtttctcaccggcatgaattatcagatgttgggcaaggtatgaattgcgactgaagaccttgccacattcattacatttgtaaggtttctctccagtgtggattctccagtgatttactagggatgacttgtgactgaagaccttgccacactcattacatttgtaaggtttctctccagtatgaattctccagtgatttactagggatgacttgtgactgaagaccttgccacactcattacatttgtaaggtttctctccagtgtggattctctgatgttgtgcaaggtgtgaaatatgatggaagacctttccacatacattacatctgtaaggtttctctccagtatgaatgatcagatgttgtacaaggtaggaattgcgactgaacaccttgccacatttgttacattcgtaaggtttttctccagtatgaattgtccgatgttgtgcaaggtgtgaaatttgatggaagacctttccacattcattacatttataaggtttctctccggtatgaattctttgatgttgtgcaaggtgtgaaatttgattaaagaccttgccacattcattacatttatatggtttctctccagtatgaatcctgcgatgctgtgcaaggtgtgacatattatggaagaccttgccacattcattacatttatatggcttctctccagtatgaattctttgatgacttgcaaggtttgattttttattgaagatcttgccacatatatcacatttaaattgcgtctctttagtatggattatttgatgtatagtaaaatgtaagccttgatgaaaggccttgccacgctcactacatttgtagtgttctgtcccaatatttgctttctctttttgtgtgaataatgaatccacaaaattacattcatatgtatgagaaatgtgggttttgacagtagaagaaatacgttggggtggggaaactaaggaactactgttgacagatttttccatgtgatcatatttatatattttcccttcagcttgaaatagctgcagttctggtagatgtgactgcgggtttaatccaagctgatttttaacaggctgcttttgtgcatcatcctttctcccatgcatgtctcttctaccaatgagactttccttataggtcacacgcactcgcttataatgtcttcaatcatgtttccacagacactgagagtcatgtacatttttctgggtttctctgaagcaaaaatcttgtatgtcgtggctttcatgtctttccaacattactgtctggaatatttctcctgtattactctccttttttggtggtaattccttgatctcacatttagaaaaaatacctacaagatataaggatcccacagtttccaattaattacagatagtcaataaatatctcctattgaaatgtgtaatagtacactaagagtaatacttatgttaaagaaagttataaaactcccattcatgatttttaactttttggaaaacaaaaggaacagatattttctaatagagaaagggtgactgcacataattcaaactaattgcagaaaagcctagtataaagaaacctatggccaaaccacttacattgcaaaaatttaggttagctccccaaaattgagattttttccaacatgaagcctgagcatactgcaatagaaggaaaacatatggctgtctaatagttgaaagaattttgtacttaagaaatttattgactaaggtcagagaaaacattctttggagcaaactgaaaaataaaaaggtatacaacacaacgaaggcacccatggcctaaatgtttgcactgaccaaaagatcctattccccaatattatgttattgcaagtggggacattgggcaacaattaggccatgaggaggaagggaggaagctctcatgaacaggattagtgcctgtataagaaaaaccactagagtacttgcttcctctcactctgacatatgatagacacagcaagaagcaggttggggccaggtgcggtggctcatgcctttaatctcagcaactggggaggccacggtgagtgaatcatctgaggtcaggagttccagaccagcctgaccaacatgattaaaccctgtctctactaaaaatacaaaaattagcaaaactccatctcaaaaaaaaagcagactggggtaaaatagaaagaaggcaccacccaggaagtgtttttatgcattttgatcttggacttcactgcttacaggtttatgagaaattatttcctgaagtttaggatgtaagcatctcagtctacagtatttcttatggcaggctgatgtggttaagacatgaaaagttagatggatgaaaaggtccatctaatgaacatgacagagactgataaatcttttttttctttttgagacgaagtctcactcttgtgccccaggctggagtgcaatggcacgacctcggctcgctgcaacctccgccacacgagttcaagcgattctcctgcctcagcctcctgagtagctgggattacaggcgactgccaccatgcccagctaacttttgtattttaatagagacggggcttcaccaagttggccaggctggtctcgaactcctgaccttaggtgatccacccaccttgggctcccaaagtgctgggatttcaggtgtgagccactgcgcccagccaaatcttttcttaaataaagtaacttttccatctttacaaaaacttcaatattcctagccgtctaccaacaccaacttgccaaaagaaacttggagtaaattattgcttttcaaatagagtaggtccaccaatttacactgcaagtaagtgaggtcaatgggatttgatcttgggctgcagatccagacatttcttaaaagtggatgcagtattgacccagcaatcccattactgggtatatacccaaaggattataaatcattttactataaaggcacatgcacatgtatgtttcttgcagcaatatttacaatagcaaagacttagaaccaacccaaatgcccatcaaggatatactggataaagaaaatgtggcacatatactgcatggaatactatgcagccataaaaaagaacgaggttggcaggacacagtggctcacacctgtaatcccagcactttgggaggctgaggtgggcggatcacctgaggtcgggagttggagaccagcctgatcaacatggtgaaaccccgtctctactaaaaatacaaaattagccgggcatggtggcgcatacctgtaattccagcaacttctgaggctgaggcgggagaatcgcttgaacccgggaggcggaggtggtggtgagccgagattgtgccactgcactccagcctgggcaacaagagcaaaaactccatctcggaaaaagaaaaaaaagaatgagatcatgtcctttgtagggacatggatggagctggaagccatcgttctcagcaaactaacacaggaacagaaaaccaaacaccgcatgttctcactcataagtgggagttgaacgattagaacacatggtcacagggagggaagcaacatagagcagggcctatcagggggtagggggcaaggggagggagaacattgggaaagatacctaatgcatgcagggcttaaaacctagatgatgggttgatgggtgcagcaaaccaccacggcacacatatacccacacgacaaacctgcacaacacgacacgacatggcaaatagatgcatagaaaggaatcatttcaagggagctacaagaacggggttgtgttgctgaccatgtcacttggtaatccttcctagacagcggtatgtccaccatcgtacagagcagacatcggtttaggctgtgttctgagaaagccgtcctacagataagcaagtgtctttccttacatggtgagagtagcatggggactgagtactgtggatattgaggtggtcagaaatacaaagattaatatgttaagaagtgacagtaggccgggagcagtggctcatgcctgtaatcccaacactttgggaggcccaggcaggtggatcacctgaagtcaggagttcaaacacagcctggccaacatggtgaaaccctgtctctactaaaaatacaaaaattagctgggcatggtggcatgtgactgcagtcccagctacttgggaggctgaggcaggagaattgcttgaaccccagaggtggaggttacagtgaaccgagatcgtgtcactgcactccagcctgggcaacagagtgagattgtctcaaaaaaaaaaaaaaaaaaaaaaaaaaaattcccacccatcttattttcacttcatgctacacagtccagggctctttgccttgctccaacaggttagaaagagactcctgcttataaaaagtaggaaacatgacatgttggaagttttctagatccccagccctatgtttctgtaggaaagaagacattacagatggacttaggaaaatatctcacaaattcctccactgactgcctccttctgaatctttaaagagcactgtaatatgtggacactgagctctcttcccagaactactgaatcaaaagcacaggagtagcaaatagggaactggatatctttaaagtctgccatgaggttttgttttgtttttgttttttgagacagaatcttgctctgttacccgggctggagtgcagtcatgcattctcggctcactgcaaccattgcctcccaggttcaggtgataatcttaccttagcctttctagtacctgggattacagacatgtgccatcacgcctggataatttttgtgtttttttttttttgagatggagcctggctgtctcccaggctagagtgcagtggcacgatctcagctcactgcaagctccgtcccctgggttcatgccattctcctgcctcagcctcccaagtagctgggactacaggtgcccaccaccacacccggctaatttttttttgtatttttagtagagacagggtttcactgtgttcaccaggatggtctcgatctcctgaccttgtgatccgccctcatcagcctcccagagtgctgggattacaggcgtgagccaccgcgcctggccaatttttgtatttttagtagagatgacgtttcgccatgttggtgaggctagtatcgaactcctgacctgaagtgatccacaagctttggcctcccaaagtgctgggattacaggcatgagtcaccacgccttgccagccataaggttttaagccttctttacttctggaacccccactgagctatcatgaagaacgcagaacatctaaaaaaggggacagtgaaagtccagatgctacatcatgaagcttttcatttcaaaatcaatacggcttccattttagtcaagcaaggatgcaactcccaagagaaacaagagaaaatgcaaagatacacaagggaacatccccacttctggagggaagttatcctcacccagggagaccaggttcctataattctccaacatcacatctctgtatagagtcctctgagcagggtccaggcatttccactcctcctgagagaattctatggccacatccctgaatgtcaatagaccctgaaatgaaaacacattttaaccaaatggttatgggaggagttcttatctttacagaaaatgaggagagcggtgacaacaaggatttaattgtagtgaatgttctgacaaatctgagtaagggatttttcaccacatgatgtcttcccagtggtgtttgattatactttttgaagaggtcataataccctcttgttataaatttattatgtttgtgaagaatacaagaaacactcaaataaatagatgcctggttcccattatagaaatgttagaaacttttggccaggtgctgtggctcacgcctgtaatcccaacactttgggaggctgaggcaggtggatcacaaggtcaggaattcgagactagcctggacaatatggtgaaactctgtctgtactaaaaatacaaaaattagctggatgtggtggtagatgcctgtagtctcagctactcaggaggctgaggcaggagaattgcttgaagccgggaggtagaggttgcagtgagccaagatcatgccactgcactccaacctgggcaacagagtgagactccatctccaaaaaaaaaaaaaaatgttagaaacttttattgacacaccaagtgacactcagtatctagatgagatagagcatgagtgatgccttcaaagatgacaacgtccacagtgaaatagccgggctcaatggcacatgcctgtaatcccagctacatgggaggctgaggccggagacttgcttgatcctgggaggcagaggttgcagtaatccaagatcacaccactgcactccagcctgttcaacagaaactccatctcaaagaaagaaaaaaaaatttagctgggcatggtggcaggcatctgtggttccaactacttgggaggccgaggtgggaggatgtctttaccatgagggtacaggttgcagtgagctatgattgcaccactgagcttcagcctgggcaacaaagcgaggccccatctcaaaatacaagaaaacaaaattactcaaagtacaaaaatacattttttatatatatgtccacaaaataataaaatttacgcagactcacaaaaaactagagttgaatgcaaagggttgtcattttccccagattttcaaaatacaaaagattttcaaaatatatacgtatgtgtgtatgtgtatatgtatatatgtgtgtgtatatctgtgtgtgtatatctctgtgtgtgtgtgtgtgtgtgtgtatatatagtttcctttaactgaagaggaatctcatcttggtggaaaaggaactttggcagttgagggcaggggagaatctgttcagttctaagaaaacaggagattacccatcctagaagcaatcactccttcaacagccttccctggaggaatcctcagatatctgtagtaatgcaggtgagcacagaggcagtgactatggcactccttatacagagaaaagtcacaaaggacccatatgttattcagccaatttccaatgcaggcatcaaagaggaaggtagccatatttactaatatgagaacatgttaattttcacaaccagcaggatgaaatatcagagtaaaatatttactaaacacaaagaagaaaacaacagacactaggcgtcaggcctctgagcccaagtctgcacgtatacatccagatggtctgaggcaagcgaaaagcacaaaagaagtgaaacagccagcttctgtcttaactgattgaccaaccttatgactttccattatgacttgtttctgccctgccccaactgaccaatggatcaacctcatgacattcttcttctggacaatgagtcctatgacctccccaccatgcactttgtgaccccctcctctgctgacaatagataaccacctttaattgtaactttccactgcttatcccagtcctataaaactgccactcccctatctccctttgctgactccttttttggactcagcctgcctgcacccaggtaaaataaacagccttgttgctcacacaaaacctgtttggtggtctcttcacagggacatacgtgacatttggtgagatgtgggacaggaggactccttcaggagactgatcccctgtcctgatctccatgaggagctccagctacgacctcaggtcctcagaccaaccagcccaaggaacgtctcaccaatttcaaattgggtaagtggtctttttactgtcttctccaactttgtcactatccctcatcatctttctcctttcaatttcagcaccacctttcaatctctcccttcccttaatttcagttcctttccttttctggtagagacagaggagacatgttttatccatgaacccaaaactccagcgctggtcacggacttgggaagacagtcttcccttggtgtttaatcactgcagggatgcctgtctgattattcacccacatttcagacttgttcaatcaccacagggacacctgccttgatcctccaccttggtggcaagtaccatttcctctttgtggcaagtaccaccccactctctctgtgtctctacccctcttttctctaaacttacgtttttactatgggcaaccatccaccctccattcctcctacttcccccttagcctgtgttcttaaaaacttgaaacctcttcaactctcacctgatctaaaacctaagcatcttattttctcctgcaacactgtttggccccaatacaaacttgataatggctctaaatggccagataatggcacttttgatttctccatcctacaagacctaaataatttttgtcataagatgggtaaatggtctgaggtgccttatgtccaggcattttttcacttcacttcctccctagcttctggtcccaatgtgactagtcccaaatgcttctttccctcctgcctgtcccttcagtcccaacaccaactgctgctgagtcttctgaatcctccttttctgaagacccctcttacctctctccccctccccaggccactcctcagaaggctgaatcaagtcccaattcttcctcagcctccactcccccaccctgtaaccctgctgtcacctcccctccccacacccagttcggcttacaatttcgttctgcagcaaatactccccaacctgcccaacaatttcctctttgagaagtgcctggagctgagggcatcggcagagtgcatgtaccattttctctatcagacctttcccaaattaatcaacacttaggccccttctcgtgagacaccactaaatatatacaggaattccagtatttaatccaatactacaacttaacctggagtgacttaaatgtcatcctaccttctaccctttccccagatgagtgggatagagtttataccctagcccagtcccacactgacacctgcaggcctcatgagccaaaccttcaacaaggcatctgggtagttccccaagaagatccctaatgggaataccagacaggctccccaggtatagctaggcaagattatgatttcctgcctagttgaagtgcttaaaaaggcagcttacaaagctgttaattatgacaaacttaaacgacccaaggtaaagatgaaaacccagcccagttcatggttcatctggcagcaattctgagacactttacagccctagaccctgaagggtcagaaggctgtctcattctcaatatgcattttatcaaccagtcagctcctgacattagaaaaaagcttcaaaaattggaatccagtcctcaaaccccacaacaggaattaatcaacctcaccttcaaagtgtgcaataatagagaggaggcagccaaatggcaatgcatttctgagttacaattacttgcctctgctgtgagacaaaactcagctgcagctccagcacacaagaacttcaaaacgcctaagctgcagtggtcaggcattcctacaggacctcctctctcaggatcttgcttcaagtgccagaaatctggccactgggccaaggaatgcctgcagccagggattcctcccaagccacgtcccatctgtgcagggacccatggaaatcagactgtccagctcacccagaagccactcctagagcccctaaagctctggcccatggctctttgactccttcccagatctgctcggcttagcagctgaagactgtcactgcccaattgcctcggaagccctctggaccatcagggatgctgagctttgggtaactcttacagtggggcgtaagtccatcccctgtttaattgatacaggggctaaccactccacattaccttcttttcaagggcctgtttcccttgcctccataactgttgtgggtattgatggccaggctcctggaccccttaaaacttcccaatttggtgccaacttgaacaatattcttttatgcactcctttttagttatccccacctgcccagttcccttattaggctgagacattttaaccaaattacctgcttccctgactattcctggactacagccacatctcattgccgcccttcttcccaacccaaagcctccttcacgtcttcctcttgtatccccccaccttaacccacaggtatgggacacctctgctccctccctggcaactgatcacacacccatacctaatcacccttaccctgctcaacaccagtatcccatcccacaacaggctttaaggggattaaagcctgttatcactcgcctgctacagcatgagcttctaaagtctaaaaactccttatgattcccccattttaagtgtccaaaagctggacgagtcttacaggttggttcaggatctgtgccttttaaaccaaattgttttgcctatccaccctgtggtgcccaacctgtacactcttttgttctcaatactgccctccacaactcactattccattcttgatcttaaacatgcttttttcactattcccctgcacccctcatcccagcccctctttgcttttacctggactgacactgacactcatcagtcccagcagcttacctgggctgtactgccgcaaggcttccgggatagccctcattacttcagccaagctctttctcatgatttactttcttttcactcctctgcttcctaccttattcaatacattgatgaccttctactctgtagtccctactttgagtctttgcaaaaggatatcctcctactccttcaacatttattctccaaaggatatcaggtatcccccaccaaagctcaaatttcttccccatccattacctaccttggcataattcttcatgaaaacatgcatgctatccctgccaactgtgtccagctgatctctcaaaccccaaccccttctataaaacaacaactcctttccttcctgggcatggttggatactttcacctttggacacctggctttgctgtcctaacaaaaccattgtatcaactcacaaagggaaacctagctgaccgcacagatcctaaatcctttccccactcgtctttccgttccttgaagacagctctggagactgctcccacactagctctccctgactcatcccaacccttttcactacacacagccgaagtgcagggttgtgcagtcggaattcttacacaaggaccaggactgcaccctgtagcctttttgtccaaacaacttgaccttcctattatacgctggccatgatgtctccgtgcagctaccaccaccctaatacttttagaggccctcaaagtcacaaactatgctcaactcactctccacatttctcataacttcccaaatctattttcttcctcacacctgatgcatatactttttgctccctggctccttcagctatactcactctttgttgagtctcccacaattaccattgttcctggcccagacatcaatccagcctgccacattattccagataccacacctgacccccatgactgtatctctctgatccccctgacattcactccatttccccctcctttcgtgttcctcatcctgatcacatttggtttattgatggcagttccaccaggcctaatcgccactcaccagcaaaggcaggctatgctatagtatcttccacatctatcattgaggctaccactctgccccactcccacagcctctcagcaagcagaactcattgcctaaactcaggccctcactcttgcaaagggactacacatcaatatttatactgactcaaaatataccttccatatcttgcaccaccatgctgttatatgggctgaaagaggtttcccccctatgcaagtgtcctccatcattaatgcctccttaataaaaactcttctcaaggccgcattctccttatgtcaagtctactccccccatatttggactccccacaacacaagctactatttctgtggtcactccattatgtatctctcagcaaagacccactggaattcccctggggaacttttcaccttctcaatgctccttcactcttcatctccaaagcccaactacatatatcacagaaacaattggggccttccagctccgtattacagacaagacatctatcaatactggcaaacttaaaaacattattgcttaggaaaacatttaccctgtatttcactccatccttggctaccttccccttgctcttcagactctcctcccaggccctcttcttatttacttatatccagccccataaataacagtgaaagtttgcttgtagacactcaatgctttctcatacaccatgaatattgaacctccccctctacacagttaccccatcagtccccattacaacctctgatggctgccgccctagctggatccctgagtctgggtaaaagacacctcttttagcacttcttctcatcttttcactttgcatttccaattttgccttgcaaaaggcctcttcttctgtggctcctccgcttacatgtgtctgcctgctaatcggacagggacatgtacactcatttttctcattcccaaaattcaatttgcaaatgggactgaacaacttcctatcccactcatgataccaaacagacaaaaaagagttattcctctaatccctctacttatagggttaggactttctgcttccactattgcccttggagctggaatagcaggcatttcaacttctgtcacgaccttccatagcctttcaaatgacatttctactagcattacagatatatcacaaactttatcagtccttcaggccaagtcaactcttagccccagttgtcctccaaaattgctgaggcctggacttactcactgctgaaaaaggaggactctgtatatttttaaatgaagagtattgtttttacgtaaatcagtctggcctggtatatgacaacataaactcaaggatagagcccagaaatttgccaaccaggcaaatcattacacaggacccatctggacactttctaactgagtgtcttggctactccctattcttagtcccctggtacctgtttttctccttctcttattcaggccctgtgtcttccatttagtttctcaattcatacaaaaccacattcagaccatcaccaatcattctatatgacaaatgctacttttaacaaccccacagtaccatcccccgcaccaagatctccccacagcctaaatccctattccttgtaactcattataaaattttccttaaggtgtccacgcagctcctaatctcactcgaagcaaccctgagaaacatcatccattatctctccataccacccccaaaaatttttgccaccccaacacttcactattttgttttatttttcttattaatataagaagacaggaatgtcaggcctctgagcccaagactgcaggtatacatccagatggcctgaggcaaccgaaaagtacaaaagaagtgaaacagccagcccctgtcttaactgattgaccaaccttatgactttccattatgacttgttcctgccctgccccaactgatcgatcgaccttgagaaattcttctggacaatgagtcttatgatctccccacaatgcaccttgtgacgctctcctctgctgacaatagataaccacctttaactgtaactatccactgcttaccccaggcctataaaactgccccaccccatctccttttgctgacttctttttcagacccagtctgcctgcacccaggtgaaataaacagccttgttgctcacacaaagcctatttggtggtctcttcacacagacgagcatgacactgcagtctagttgagggtggagggtgggaggaaggagaggcataaaaaagaaaaactattgggggccaggtgttgtggttcatgcctgtaattccagcactttgggaggccgaggtgggtggatcacctgaggtcaggaattcaagaccagcctggccaatgtggtgaaaccctctctctactaaaaatacaaaaattagccaggcatgatggcaggcacctgtaatcccagctactgaggcaggagaatcccttgaacctgggaggcagaaattgcaatgagctgagatcataccagtactctggcctgagcaaaagagcaaaactcagtctcaactaaataaataaataaatattgggtactgggcttaatgtcaaggtgatgaactactctgtacaacaaaccccgatgacacgagtttacctgtgtaacaaaccttcacatgtagccccaaacctaaagtaaaaaaatgaatattgtcaggcctctgagcccaagctaagccatcatatcccgtgacctgcacgtacacatccagatggccagttccttccttaactgatgacattccaccacaaaagaagtgaaaatggcctgttcctgccttaactgatgacactgtcttttgaaattccttctcctggctcatcctggctcaaaagctcccccactgagtacgttgtgacacccactcctgcccaccagagaacaacccccctttttcctttacctacccaaatcctataaaatggcccaacccctatctatctccctttactctctttttggactcagcccacctgcacccaggtgaaataaagttttattgctcacacaaagcctgtttggtggtctcttcacacggacacgcatgaaatttggtgccatgactcagattgggggacctcccttgggagatcaatcgctgtcctcctgctctttgctccatgaggaagatccacctacgacctcaggtcctcagactgaccagcccaagaaacatctcaccaatttcaaatccggtaagtggcctctttttactctcttctccaacctccctcactatccctcaacctctgtctcctttcaatcttggcaccacacttcaatctctcctttctcttaatttcaattcctttcattttctggtagagacaaaggagacacgttttatccgtggacccaaaactcgggcgccggtcacggagtagggaaggcagccttcccttggtgtttaatcattgcagggacgcctctctgattattcacccaggtttcagaggtgtcagaccacacagggacgcctgccttggtccttcacccttagcagcaagttccgcttttctagggaaggtgtaagtaccccaacaccttctctctgtgtctctaccccttcttcgcctttctggggggcaagaaaccccaaccccttctccttcacccttagcagcaagtcccacttttctaggggaggagcaagtaccccaaccccttatatctctgcaccccaatcccttatttccatgccccaacctcatatatctctgtgccccaacctcttatatctctgtgccccaatcccttatttccatgccctgacctcatatctctgtgccccaaccgctttcccacttttctggaggtaagaacccccaaaccccttccctccgtgtctctactctcttttctctgggcttgcctccttcactataggcaatattccaccctccattcctccttctccctttcctgtgttcttaagaacttaaaacctcttcaactctcacctgacctaaaatctaagcatcttattttcttctgcaatgccgctggaccccaatacaaactcgacagtagttccaaatagccagaaaacagcactttcaatttttccaccctgcaagatctaaataattcttgtcataaaataagcaaacggtctgaggtgcctgacatccaggcattcttttacacatcggtccctgtgcccagtctctgtgcccagtgcaactcatcccaaatcttccttctttccctcctgcctgttccctcagtcccaaccccaagcatcgctgagtctttctaatcttccttttctacaggcccatctgaactcttcccctcctccccaggctgctccttgccaggccgagctaggtcccaattcttcctcagcctccgctcctccaccctgtaatctttttatcacctcacctgctcacacccggtccggcttacagttttgttccgtgactagccctcccccacctgcccagcaatttactcttaaaaaggtggctggagctaaaggcatagtcaaggttaatgctcctttttctttattccaaatcagataacgtttaggctctttttcatcaaatataaaaatccagcccagttcatgactcgtttggcagcaaccctgagacactttacagccctagaccctaaaaggtcaaaaggccgtcttattctcaaaatacattttattacccaatctgctcccgacattaaataaaactccaaaaattaaattccggccctcaaaccccacaacaggatttaattaacctcaccttcaaggtgtacaataatagaaaaaagttgcaattccttgcctccactgtgagacaaaccccagccacatctccagcacacaagaacttccaaacgcctgaaccacagtggccaggcattcctccagaacctcctcccccaggagcttgctacaagtgccagaaatctggccactgggccaaggaatgcccgcagcccaggattcctcctaagccgtgtcccatctgtgtgggaccccactgaaaatcggaccgttcaactcacttggcaaccactcccagagcccctggaacgctggcccatggctctctgactgactccttcccagatcttcttggcttagtggctgaagactgacactgcccgatcgcctcggaagcctacaggaccatcacagatgctctaagtaactctcacagtggaaagtcagtctgtccccttcttaatcaatacggaggctacccactccacattaccttcttttcaagggcctgtttctcttgcctccataactgttgtgggtattgacagccaggcttctaagcctcttaaaactcccccactctggtgccaacttggacaacactcttttatgcactcttttttagttatccccacctgcccagttcccttgttaggctgagatattttaaccaaattatctgcttccctgactattcctggactacagccgcatctcactgctgcccttctccccaacccaaagcttccttcgcatcctcctctcgtatccccccaccttaacccacaagtatgggacatctccactccttccctggcaactgctcacatgcccgttaccatcccattaaaacctaatcacccttaccccactcaacgccagtatcccatcccacagcacgctttaaaaatattaaagcctgttatcactcgcctgttacagcatggccttttaaagcctataaactctccttacaactcccccattttacctgtcctaaaaccagataagacttaataggttagttcaggatctgcaccttatcaaccaaattgttttgcctatccaccccatggtgccaaacccatatactctcctatcctcagtacctgcctctactacccattattctgttctggatctcacacatgctttctttactattcctttgcacccttcatcccagcctctcttcgctttcacttggactgaccctgacacccattaggctcagcaaattacctggggctgtactgccgcaaggcttcacagacagcccccattacttcagtcaagcccaaatttcttcctcatctgttacctatctcagcataattctcataaaaacacatgtgctctccctgctgatcgtgtccaattaatctcccaaacctcaatcccttacaaaacaacaactcctttccttcctaggcatagttagtgtggtcagaattcttacacaagagccagaacggcaccctgtagcctttctgtccaaacaacttgaccttactgttttaggctggccatgatgtctgcgtgcagcagctgctgccgccctaatacttttagaggccctcaaaatcacaaactatgctcaacttactctctacatttctcataacttccaaaatctattttcttcctcatacctgatgcatatactttctgctccctggctccttcagctgcactcactctttgttaagtcccacaattaccattgttcctggcccggacttcaatccggcctcccacattattctggataccacacctgaccctcatgactgtatctctctgatccatctgacattcacaccatttccccatatttccttctttcctgttcttcacctgatcacgcttgatttattgatggcggttccaccaggcctaatcgccacacaccagcaaaggcaggctatgctatagtacaagccactagcccgcctcttagaacctctcatttcctttccatcgtggaaatctatcctcaaggaaataacttctcagtgttccatctgctattctactactcctcagggattattcaggcccccctcccttccctacacatcaagctcgaggatttgcccccacccaggactggcaaattagctttactcaacgtgccctgagtcaggaactaaaatatctcttagtctaggtagatactttcactggataggtagaggcctttcctacagggtctgagaaggccactgcagtcatttcttcccttctgtcagacataattcctcagtttggccttcccacctctatacagtctgacagcagaccagactttattagtcaaatcagccaagcagtttttcaggcttagtattcagtgaacccttatggtcctccatcttcaagaaaagtagaacggactaaaagtcttttaaaaacacacctcaccaagctcagccaccaacttaaaaaggactggacaatacttttaccactttcgcttctcagaattcaggcctgtcctcagaatgctacaaggtacagcccatttgagctcctttttattaggccccagtctcattccagacaccagaccaacttggactgtgccccaaaaaacttgtcatccctactatcttctgtctagtcatgctcctattcacccttgtcaactactcataaatgccctgctcttctttacactgccagtttacactgtttctccaagccagcacagctgatatctcctagtgctgtccacaaaccgccactcttaactcttaaagtaaataaataatctttactggcaaggctatgctgaacctccttaggcactctctagtattagatgtcgtagttcctcccaattcttagtcctttaatacctgtttttctccttctcttattccgtttagtttttctattcatacaaaactgtatccaggccatcaccaataattctaaatgataaatgtttcttccaacagccccacaatatcaccccttaccacaaaatcttccttcagcttagtctctcccactctaggttcccacgccacccctaatcccgctcgaagcagcccagagaaacatcgtccattctctctccataccacccccaaaaattttcaccgtcccaacactttaccactatttcgttttatttttcttattaatataagaagacaggaatatcaggcctctgagcccaagctaagccatcatatcccctgtgacctgcacatacacatccagatggcctgttcctgccttaactgatgacatcgtcttgtgaaattccttctcctggctcatcctggctcaaaagctcccctactgggcaccttgtggcccccacccctgcccaccagagaacaacccccctttttcctttacctacccaaatcctataaaacggccccaccccatctcccttcgctgactctcttttcagactcagcccacctgcacccaggtgaaataaacagctttattgctcacacaaagcctgtttggtagtctcttcacacggacgtgcatgaaaaatataatttcttttaatttactgccgttttttcctaaagtctcataatgatgcaaaaatacacgtgtacgagacttgctctgataacctggcacagaactgacagtagcggctccccagtgaggctggaaggagggtggaggatgtgacagggaaaggagacgctttatggccaagggcctaagatgcagctttgcttagagttttaccacaaaacaaatatattcattggtcaggtgtggtggctcatgcctgtaattccagcacttcgggaggcccaaggcaggcggatcacctgaggtcgggagtttgagaccagcctggccaacatggagaaacctcatttcttctaaaaatacaaaattagccgggcatggtgacgcatgcctggagtaccagctactcaggaggctgaggaaggcgaatcacttgaacccaaaaggtggaggttgcggtgagcaaagatcacgccattgcactccagactgggcaacaagagtgaaactctctcaaaataaataaataaataacaaatatatacatcatgtgatgttcaaatataaaaatatatattcattattaattggtggggctgggcaccgtggctcgcgcctgtaatcacagcactataggaggctgaggcagaaggatcacctgaggtcaggacttcgagaccagcctggccaacgtgatgaaaccctgtgtctactaaaaatacaaaaagattagccgggtgtggtggcatgtacctgtaatctcagctactcaggaggctgaggtaggagaatcacttgaactcagaaggcagaggttgcagtaagccaagatcaggccgttgcactccagcctgggtgacagagcaagactccatctcaaagcaacaacaataataataataataataataggtggaatgagaatatggctccatcctctaggatacaaaagtgcttctcccatagttgagaaaaatagtaactatttttaccaaaaacacctgtttcagaagcctcttaacaccacaatctccacgagcttaatgtgctaagaatggtttaaagaatctcctgctattattcaggttgatttcctattcttaaaataatgatggaataaaacaccttgtatcatgcatgtctgtgtatgaactttccattctaattagtaagatttttggagtcagaaacaaagtaactcactaaattacctaaaaatatagtataaaatcagggagaaaagatttccccttatttgtctccttttctagaatttaccacatacttcgtggacattaatacgtgacttccattggcagctgctctaatcctggtccacagagagttgacagagcatccagatgtggcccctgaacaatccctgctgcccaacagcactgacaccacgggaccctcaccccgtctccatccatgtctgggtgtgggcccttaccaggaccatgcccagtgcagcctcttcccaagttcatgtgattgggtcacaagagatggaatctaagtgagatgagagggactgagggaaggcatgggtgagtgtgagcaaacctgtcaggcaggacacttcttgagacccagagaagattcccaactccaaggcccagggtttctgaaaggaaagagacagaacaatccaccgagaatatcatctcacctgaggaagaaccattcctgacgcctttgctttcctcttccccttccgggtttcttcctcatgtaccaagagtccttagaagtcaatcctgaatgttaaaaatatgttgtttattgctcagaatcaatacaccccattcctgtaacataacaacacatacaaaggagacctcaccctgaggaaatatggtcccctctgctgcccactgcaccagagacgataaactcctacaggaaaactcccgcacccttctggagaagcccacaccacacccttctggaggagtccacacacgctgcagcagtggggagctgggctggaatgagctcctcttcagggcgcagacccagccctgaccaaaccccatgcagaaactgggtgcagtggctcatgcctgtcatcccagcactctgggaggctgaggcaggtggatcgcttaatctcaggggtttgagatcagcctgggcaacatggtgaaaccccatctttgccaaaaatacaaaaacatagccaggcatgaaggtacacgtctgtgtgtctatgttcccagctacttaggaagctgaggagacagaatcgcttaagctcaggaattagagaccagcctgccaacatgttgaaaccctctactagaaatacaaaaattgggctggccacagtggctcatgcctgtaatactagcactctgaaaggccaaggtgggcagattgtttgacgtcaggagttcgagagtagcctgggctacatggtgaaactccatctctactaaaaatacaaaaagtagctgggcttggtgggcgtctgtaatcccagctagttgggaggctgaagcaagagaatcgcatgaatctgggaagctgagattgtggtgagccgaaatcacgccactgcactccagcctgggaaacaacagggaaattccaactcaaaaaaaaaaaaaaactatgtagaccacgtgcggtggctctttcctgtaatctcagtactctgggcggccaaggcaggaggatactttgagcccaggattttgagactagcctgggaaacacagtgaaacctcgtttctacaaaaaaaaaaaaaagaaagaaaaagaaaactagccgggcttcttggtggctcatcactgtggtcccagctacttaggaagctgacgtaggaggattacttgagcccaggaggaccaggctgcagttaaagatcatgccactgcattccagcctaggcaattggccagaccctgtctcttaatgttagttaattaattaagttaaaaattatgtgttaacagaaagggatttttttctcacttcactgccccactccctaccccactctgggaaaagggaacagagtgactcacaagtgaataagtcactccactgtagctgaatagggattccaagtggaagctaacctctgaggccaacattcatagaatgtacatgtcttatagataggattcttaaaattctcaatctcatctgtataatttaagcagttttaagttactagattatatacaaagaagtcaaatgtcacaactaatcgtatccaatgaactcacccactcatctaaacccaaagtcctccgcccctttttttcttttgagacagggtcttgctctgttgaccaggctggagtgcagtgacatgatctcggctcactgcagcctggacctcctgggttcaagtgatccttctgcctcggccttcagagtagctgggattacaggtgcacactatcatgcccggttgtttttttttttttttggtagagatgggggtctcactatgttgcccaagctagactcgaactcctgtactcaagcaatcttcttgcctcagtctcctaaagtgctgggattacaggcgtaagccactgcgcccagcccatctttcttcattactgtgcttccctccctaattgtgtacatatctctcattctccccttctctctctagctcttgttttcttttctttttacctggcattctgctcctcattttgtacccctctcctctcctgctgtttatccccttcttccctctattccttctcttccacctcttctgctccatcctcgcaacttacctaacttcttgctgttccttctccccaatcgttctatcgtcctcaatcttgatatatttccgcctcttctcccatctctgtgcatcctctgctctccctgttaaattccgtcttccctgttataccccctgtccccaatatgtggaaccacagatccccaggtgtcctccctgctgtggttctccctctgttctccttgccaccagcaccactctgctctgtctgccctggctccaaatccctcctcctctccctcactctgatgagattccctctttgctgcccctctccctaccttgctgtccttcatctctctgtacatctaggtttctctacgtttctccagttacttttctcctcctgctttctttttttttcttttcacttttgctgtctcttgacaaatccatcacccaccctctactttgccctctgttatgggtctttctcattcttttctctgtctcagcttttctactgctctgtctcccaatgcctttggccgacacaatcacaggagggtttggataagacgcctgcatcccggaggagctcgttttccgggggctggagctgggcaggcaagaacaccccgtgtcacaggacaggccccgggtacctccccaacgcgggttcaggggaagaggtgactgtggaggagagacctgtggagcagcagggcccgccacgaggagggaggtgggggggagacggcgccttaagacaaggttggggtctgcaggattccaggaccaggcaaagtacgcggcctccctgggactggggccctggcgctgcgctccagtggcctacgaaggcgagggtgggaggcgcccagggcgggaatccagctctcgggtgaggactttaaaaagcgaggggcgggaggagtcagaaaacagttttgagcaggaaaactacgcgacaggaagtgtatacatcgccctacagcagaaagaccggggacagcccagcctcagggcgactttaaacccaaaaggaagcgatatccggactctcatggggacgtctcaatttgtcctgggtgaaggaagaagggagagaatttccaggtctgtggggaccccacgtctcaggtacagcagcgccggggacctggtaagcgcagacttaatagaagagcgaaactcaccgccacggtgtaactttcactccacataatccgcttccgggtttgcgcgcatgtgcgcgcgcagtacagaagccaggtctgggcggggcccgcgaggtgggcggggcctggatgaggtaggggcggggtgggaagccgagagactttcccctttagaaccagcagtgggcggggccagggcgggacctgtgagtctctcagcatcgttcccagcgcagaggcatttttcgggttttggaggcgagaccggccaggaaggctgaggcatgattcaaaagccctggaattatctggaacggggatgcaaactagaatgtgaaatgcaaagccctgcctgggcggaaggtacaatttcatgctgatagcccacagaaccgaatagaaatcctctccctttctattctccattcacttgggagagagtccacgctgtgctcagctttagagactcaggccactgcctgagatgcaggatggagtgctcaggccaaggatgggtgaggtcaccacctgcggcttaaacacagctgggatatgggcgcgggagtgggagcctgaggtcccagctattcaggaagcagcggcgggaggatcgccgagcctgggagttcaggccagcctgggcgacaaagtaacaccccctcccgcagggctcccttcctcgtctctctctctcttttcttttttataataaaatttttgatgatgttacatagggatccaacattattcttttccacgtggatatccagttagttgtcccagcgtatttgtgtaagagatctatcagtttctttttttgtttcttgagatggagttttgctctagttgaccaggctggagtgcaatggcgcgatctctgtctcccaggttcaatcgattctcatgcctctatctcccaagtagctgggatcacagggatgtgccaccatgccctgctaattttgtatttttagtagagatgggatttctccatgttggtcaggttggtctcaaatttccgacctcaagtaatccgcccgcctcggcctcccaaagtgctgggattacaggtgtgagccaccgcgcccggcttattttcttttatatatttagttttttctatttttttttttttttttttttgaggcagagttttcttttttggccaggctggaatgcggtggcgagatctgggctcactgcagcctctgcctcctgggttgaaccgattttcctgtctcagcctccggagtagttgacattacagacgcgcacaaccatgcccggctaatttttgtattttcgatacaaacgaggtttcactatattggctaggctggtctcgaacttctgacttcaagtgatctgactgcctcagcctctgaaagtgctgggattatagtcataagccacacttcctggcccaaaaaatattcatttctttactctttaaattttgagaaaatataatggaaaacaaaaaaaatcttccccccaatgagaaatcatcttcacgatgataatagtgaaagaaataaaaaccacattattaataagtaagccttaaaccagaatgtgatgggaaattgaggcaaacagctaagaggttgaaaagagacaaggaaacttcactgttctatacaacccattgagtacatgttttcaagataaacactaatcagtcctcagggaagaggacttgacaacactcttggtcacacatagttcatcctggctctatttggtaatggaggtgaccatctgtgtcagctaattagcttcatccagagggagggggaaaaccctaacccatgtctttttgacgagtgtgagttttacaacatagcgacgcgtgccctctctggtcaggcgcctacaatccgacagaaactgacgtcagcagtaaataataaaatttagaatgtaagattaagtactgagtttatgtgaacacaaagcttgaagaaagccacctggaaacaccaactccaaataaatgagatcggcgttccaaagtagagacgttaaggtttcacacacagggaaagacagagaatctttagcagaatcatgacagctttcattcaagcccagtgcataggttgcagcaacttgattggttatggattgatacaattcgaggaaggtcactttatcactccataagaagtaacaatgatcccatgaggtcttatctctggggctgcttagtcttcctaattattaacaggaaaactcttttttgtttttctttgagaggcagtattgctctgtcgcccagtggtgcaatctcagctcactgcaacctccacctcctgggttcaagcagttctactgactctaattgtcagtcctctctgcaaccagcgccccagtccacccctttactgaggtccctgccctccccactgcgctgccccagactgaggggggagttcgccccgactgcaggactctgcctgctcaaacaaggcgctttgcattaaaaccattttcaacttaagaggaaaaacgattcagtgttcagtacaggtgtcctactacaacatgttgttttatcttcgattgtctgaaacactaacttgaaatgggcaggaaacatccctgtgatattaggggtaatatcacggcacatcagaaccaatccaccaatcagaactcggaggatttagtccaggcgggcaagaggatgacagcaggcgacatctggggcccagctgaggagagagcccgaacccgacccttgccggcccccacccttcagaacaacaccccctccagaccccgcccccaagatgacgataaccctctggttctgccctttcccattgtatggcctggcccccaggcggcctcctccctcttgccccgccccagtcttgttccaggcaccgcccccacgctctagctctcctaggttcctgcttaagtttatacactcatggtccacagagtcctaagcagaaatatggaagacaccaagctctggtaatgtatctatctgacagactgagcgtctgcctcaagaacatagcaatagcaatactaagtgaaatattaggaagtttcacgtatgtatataattgatcatttattatttgcagctttaaattggctaaaattacatagcatgggtttttattttaatcaaatattagaaatatatcattcataaatggaatctaagcacacaaagttgaagagcatttccctatgttgaataaatatgaaggagttcagattttggaactgatttagtgctttccattacacttagttcttttcttttcttttactgttttttgagatggagtttctctcttgttgcccaggctggagtgcaatggcggcatctcgatcattttggaactgattttgtgctagtttttttcctattcttttttttctgtgttcatgagcttgtgaaccaaaagtatctaacaggtctcaatcaatttagaaatctcctttgccaaggttaaaaatgcacctgtgacacagcctcaggcggtcccgaccacaggtgcccaaggttttcaggctgcagtttggttttacatattttacagagacatgagacatcaatcaatacatataagatgtacattaattcggtctggaaaggtggaaaaactggaattggggggcttccgggtcacaggtagataataaattatcacattctttgagtgactcatcagcctttcactgaatacacaatttatatatgagagggagtagaggaatagtcacttatgccttaatctggctcattgactctgaatttttacataaatagggcaggggaagcagtcagataggcatttgactcaggtgtacagagggacgggttctgtcccacacctgtgcagataagctatcagtttacattgccagggtaaaattcaacagaactattttagggtgaagagcttgaggcttccagtttgtgaggggagtattgtagctttttttttttttttttttttttttttttgagacagttttgctcttgcccaagctggagtgcagtggcccaatctcggctcactgcaaccttcgcctcttgggttcaagcgattctcctgcctcagcctcttgagtagctgggattataggcaggcaccaccacgcctggctaattttgtatttttagtaaagaccgggtatctccatgtcggtcaggctggtctcgaactcccgacctcaggtgatcaactgcacccagcctctaactttttaaaaatccttgtagctatcttgtttaggaataaaacgggaggcaagtttgtctgacacagttcccagcttgacttttctctttggcttagtaatttttatttttctttcaccagcttgtgacagacataaggctttgacacactgatatttctttatatacattttccataacagtaaagtccaagggtctatcatgaactgggttagtggtgcatgtctgtgtgtctgtggtcccagctacttaggaagatgaggtgggaggattacttgagctcaggggttcaagaccaacctggtcaacatggtgaaaccctgtctctactaaaaatacaaaaattgggccgggcaccatggctcatgcctataatactagcactctggaaggctgagatgggcagattacttgaggtcaggagtgcaagaccagcctggccaacatggtgaaaccctgtctctactaaaaatacaaaaagtagccaggcttggtgggtatctgtaatcccagctactggggagactgaggtaggagaatcgctttaacctaggagtggaggttccagtgaacttgggtggtggaggttgtagtgagccgaaatcatgccactgcactccagctgggcgacagagtgagactcaaaaatacaataaactaaaaataaaaatacaaaaattagccagctttgtagcacaaacctgtaatcctagctacttgggaggctggggcacaaaaatcgcttgaacccaggagacagaggttgcagtgagtcaagaaacagagactgcactcacaggctggaccacagagtcagactctgtctcaaatagaaaaaaaaaaaaaaggcattaacgatgtgagtgatgcagagataaaaatcctgagcaactgtcgggcatggtggctcactcctgtaatcctagcacgttgggaggctgaggtgggtggatcaagaggtcaggagattgaggccatcctggtcaacacagtgaaaccccatctttactaaaaatacaaaaaattagctgggtgttgtggcatgcacctgtagtcccagctactcgggaggctgaggcaggagaattgcttgaacctgggaggtggaggttgtggtgaactgagattgtgccattgcactccagcctgggtgacaagagcaaaactctgtcttaaaaaagaaaaaaaaaaaattcctgagtaacgtgagagactgacaggcagaggaatcttcagatgggggtgggagggcatgggagacatctctgagcctagacctgaaggaggagaaagggacagtgctgtcatcatttaggtacatagtgtaagagcagggacaataacctgagacaggaagggttttgatgtttgggaaaagagaaaagcaactgtgactggggcagaggtagtcatgagatgagggcaagttcccaggaggaagctggacactggcaggggccctggacacagggctgtggagccacagtgaggagtggggcttttgtcctggggaacacgggaagctggtggagggttccctgccagggactgacatgacctgctttagatttcgctgtgatgtcctcacacagagaaaggccccgaagatggtctctgtgtctgagtctacaactctgtttcttccattcttctttttttttttttcatttttagggtactgcatcccatttaaaattctaattacaactggacagtcccctctcacagaaaaaaagccacatccagacacccactctattttgccaatcatttcaggggccagggtcactcaggttgagcttttccggtctagcccctcatctgcaagttgcagggaggctcactgaggctcagagtgaagacattttcaccgagttaccctgagaaggtctgagatgagtgaaaagatgtgtctgaattcttacatgtgggcctggaagggctaatgggaagggttggtctttatcacacccattattgaaaattaaagaagtgtcttccacatacctgggctaaaaaaacctcttttgcaaggttctgatgccattgactcccaacatttaattcttcattacaagaaaatcacagtaacatttataaaatgcagaagtgtgaacacacagttattgaccttgaaaacagtgaaagaaggtcagctgtagaactaagacatgagcaaatgttttcaatcaagaatacatgggtggccgggtgcgatggatcatgcctgatattgcagctttttgggaggtcgaggcaggtggaggtctcaggagtttgagaccagcctggccaacatggtgaaactccatttctactaaaaatacaaaaaattacctgggcatggtgacaggcacctgtagtcccagcaacttgggaggcagaggcaggagaatagcttgaacccgggaggaggaggttgtggtgagctgagatctcaccattgcactccagtctgggcaacaagagcaaaactccatcttaaaaaaaaaaaaaaaaaaaaagggggtgcttttggcacagcgttccgtgccaatccaacccatctttcaacatttgtccagaatggaccagagggcctgagggaaacatgcacttaatagcttacagctcaagattttaacaaatgacataaggaaagaaaactgaaaaatagactaactggttaaactacactttgatgttacggtaaaaggtcactgacatctttaccgggtacacactgaaacaatcaaacctctgcattaggtaccaaaggtttccaataaataataaagactagaaagcatgcacatctcgatttgaaccagacacaaacagaaactattttgaaattgttttaaaaaatataacaaattctggggtcaacaggaaaataactgaaaaacatacatgtacagaaaaaaatgatgtgagctgattataggatgcaacaaaggcatctttcagaagtgattatgtattaaaaaagaaattttgaaaactaagatttatcttggccaggcacagatgctcacgcctgtaatcccagcactctgggaggcaaagatgtgcagatcacctgaggtcaggagtttaaggtcagcctggccaacatggtgaaactccatctctactgaaaatacaaaaattagctgggcgtgctgacatatacctgtagtgccacctactcaggaggttgaggcaaaagaatcacttgaacccgggagacagaggttgcagtgagccaagatcatgccactgcactccagtgtgggtgactgagtgagattctgcccccccccaaaaaaaggataaagaaagaaaaatagaaaaatgaagaggaaacagaaaaaaaaataaagtaaatctattacacaagagaacaaaagcagttttcatgttcctgtttttgattttgtttattttttgtttgtttgcttgtttttgtgagatggagacttgctctgccacccaggctgcagggcagtggcatgatttcggctcactgcaacctctacttcccaggttcaagtgattctcgtgcctcagcatcttgagtagctgtgactacaggtgcatgccaccacgcccagctaatttttgtatttttagtagagaccaggttgcaccatgttggccaggctggtcttaaactcctgaccttaggtgacctgctcatctcaggttcccaaagtgctgggattacaggcatgagccaccatggtttgatattcctttaaaaaattatatgtaggccaggtgtgatggctaatccctgtaatgctggtactttgagggtccaaggcaggaagatcctttgcatcaaggaatttgagaccagcctgggaaacagtgaaatcccatttctccaaacaacaacaacaacaaaactagctgggattggtggctcatgcctgtggtcctagctactcgggaggccaaggtacgaggatcacttgacccccggaggtcaaggctacagttagaggagatcactccatggcactccatcctgggtgatagagccagatgctatctgaaaatattaattaattagttaattaaattaaaagtattattgaggcagaaattaaagaagaaagcaaattttcctctgctgagctcactcactccaaggatagtaacatgaaaggccatagaaaggtttgtggtgacccagtctaagaaactggatacatcccccccaactacacatggttaagaaaacaaattcctttactgtctctcctttcccagaatcattaattttgactatttttgcaaatgtctgcatgtctgtatttagcaaactctgtaagttcctgtttttcttttgatgcatctgcaaggtcacagctaagcaaggccacaagttataccaaggcagcagttatggtatagattacataacctgtcactgtatgatttactgtctttgtcctgcttctgtaagcttgcctatataagcccagctctgtctttgttctgggcttagctttctggatgtgagtccactgagctggtgtgcaccttaataaaactcctatgtttcacccattgatctctccagtcctctcatttcccacattatgtaataacagaaagtggtttttttcccacctcaccgccccacttcctacaccaccctgcaaaaagggaagagagtgagactctcaagtgaataaatcactatcctgtggctgaatagggattccaagtgaaaactaacctctgatgccaagatttatagaatgtacatgtcttatagataggcattttaaaattctcagtttcatctgtataatttaaataatttatttattatatacacagaagtgaagatgtcacaagtaatcatatccaatgaactcactcactcatctgccttggcctctagagtagctgtgagtacaggtgtgcaccatcatgccctgttaatttttgttttttggaagagatggggggtctcactatgttacccacactggtctcaaactcctggactcaggcaatccccttgcctcagtctcctaaagtgctgggattacaggcattagtcactgtgcctggcccctctgtcttcattactgtgcttccctccctaattctgtaaatatctctcattctccccttctctctctagctcttttttttctatttccctgggattctgcacctcattctgtacccctctcttctgctgctgtttattcccttcttacctctattccttctcttccacctcttctgcttcatccttggaacttatataacctcttgttcctccttctccccagtctttcaatcatcctcaatctccatatatttccacctcttctcccatctctgcacctcctcttttctccctgttaaattatctcttccctgttatacccctctgtacccactctctggcaccctagattcccagctgtgttccctgctgttgttcttcctctgttctccttgccaccagcaccactctgctctgtctgtcctggctgcaaatccctcctcctctccctcactctgatgagcctccctttttgctgcccctcttcctgccttgctgttcttcatctctctgtacatctagcttttctctacatttctccagttgcttttctcctcctgctttcttatcttttttttttttcacttttgtcacctcttggcaaatccctcacccctcctctactttaccatctgttatgagtctctctcattcttcttttctctgtctcaggttttctactgctctatgtctgtctcctgatccctttggcccacagaattgtggtaaaggttaaaaagaaaaagaaacaagttttcttctgcttagcagctcacttcaaggaaagttataagataacgctgtccaaaaagctaaggctaaagtaatgggctctagacactttttaaattccagaacaaagtgaaggaaaaaaaaaagagagagagagagaaagacaaattcttctactgttactcatttccctagtctcttaagcatgactatgttttacaaatgtctgtatttagccagttcttttttttgacacagctacaaggccaccagctatgtagaatccaacttctctaagactcatacaatataagccctatactgtaatcttgttcagtcccgctgctgttaaagttgcaggtgttgtgccttagatccaccacagtcagctgaaactggcagctcaagacaagtagacaagccagcaggacccagatcatccaactcatcctgagatgagatcaacctgctgctaaagaagactgcctgctctagtcactacggagtctgaccagtctatgcacagctgaagcttgagggaacaagccctgttctagtcacacaccagaagctgactagtctatgcatggctgaagcttgaaactccaggccctacctccacctccaccctctaaccaggcccagcttccaaagcagcctccaccctcttgcccagctccagcgacagttttcatgccctgccccctcaacgacctttcccttctcccgccgggtccccacccactgtccagaacccacccagacagggttgaaggcccacacacggttgttcttcagcactcgaggctgacacaggtgagtggtttttttgtcttcctgcttcaaacctggctttcgcagcaccccagcaccaattccagccacaccaggaatctgcatgctttgggatattgaaatcccccacgtgagtttgtgcagttgtcaggaagtcccaacttctccaagggaagcaggcaggctggtggctttgcagcttttgtatcgttttataaaatgatacaaaagatcttgtatgagccggtatgacacatctgacaactttacaggtaatattggagtattatatataaggcagttgatttgcaggactgctatgagagtttgggaacgtaaatacctatccagccaaaacgttcccattgtagaccagaaattcccgacccaagatcctcaatgggataacgacacagtccactaaaaattcatgaaagatataagggaaatgataattaaaggaattcaggagtcagtgccctgtgctcagaatcttccccgagcattttagataaaacagaaaaaagatgaaagccctaaaaactttctaaaaagactatgagaacaaatgagaaaatatgcacatttggatccagaagaccctagcaggcaagaaatgttaaagctacattttgttaccaatagctagccattggtagccatttagcaagccattgcaaaaaaagttacagaaactagaaaactggaaaaaacagtctatacgggaattcttagaataagctcaaaaagtatatgtaaggagggatgaagaaaaaccaaagcaaaaagaaaaattttctgacagaatgcaccagaggccaagcttaagcctccatttgccaggcctcacaaaagatatgagacaggggggccacagaactcaaagacaggtaaaaagggaaagcaaacccagtaccctaagactccaaaaactgaaaagggagagggacaagacaaatgttacaagtgtggaaaattaggtcatttcaaaagagaatgtcctgagtggagaaaggagaaaaaaaaatcccacttaaggaatttaaagaataaggaagtcaagggctctgtcttttctatctccagtcccactgagagcccgtggtaaatttaaaggtgggaccaaaacatgagcttgttacttttctttcttttttttttttgagacagagttttgttcttgttgcccaggatggagtgcaatggcgtgatcttggctcactgcaacctctacctcccaggttcacgtgattctcctgcctcagccttcccaagtagctagtattataggcatgtgccacaaagtctggctaattttgtatttttagtaaagatggggtttctccatgtgggtcaggctggtctcgaactctcgacctcaggtgatccgcccaccttggcctcccaaagtgctgggactacaggtgtgagccatggcacccagccgaacttattacttttctaatagactcaggagcttcccactcctctgtttgttttgtgccctctaatataaattgtttattagaagaacttcaagttttaggagtcaaaggggaaggatttaaagccaaagtctcagaaaaaacagaagtcagatttgaaacccgatcaaccaatgttaaatttttgctacttcctaaggctgggacaaacttgttaggaagtggcctaatggcaaagttaggtataggcttgcgtgtaagcccagaaggattcttcacttcattaaacctgtttactacagcagaagaaagctacatcaatgctaatgagtggtcaagggagggaaattgaaggaagctacaagttcctccaattcacataaagttaaaaactcccagggaaacagtgaaaagaaaccaatatccaattcccttagaaggtagattaggtttaaaacctctaattgagagccttatctgagatgggctacttgaactgtgcatgtctccctatactactccaatattacttgtaaagtagtcagattggtgatactgacttgtagaagatcttcaagccattaatcaaactgttcaaaccactcatcctgttgttcccaatccatatactattctcagcaaaattccatatgaccatcagtggtttacagaaatagacctgaaagatgccttctgggcatgtcctttagctgaagatagtcaggatatattcacttttgaatgggaagattctcactctgggtgaaaacaacaatactgctggacagtcttaccccaaggatttacagattctcctaacttgtttggccaaattcttgaggaggtgttagaaaagatgagcatcccaaagtgtatatctatgctccagtatgtggatgatatactagtgtcagggaaagctgtagaacaagtatctggcttttccatcagccttctcaaccatctctgtggagagggactatgtggtgtggtggcacacatctgaaatcccagctacttgggaggcttagaaaagagaattgcttgaatgcaggaggtggaggttgcagtgaaccaagattgtgccattgcacgccagcttgggcgacaagagaaagactctgtctcaaaaaaaaaaaaaaaaaaaagaaagaaagaaaagaaaagaaagaaagaaggaaagaaaaaacaggctgggcaaactggttcaggtctgttggcccagctggtctcaaactgctgacctcaagtgatctgcctgccttggcctcccaaagtgctgggattataggtgtgagcaactgcaccctgcccattcttcttgacgtaaacactttttatgtcaattaatgcttgaactcaatgttaagtcaactcaaactctagtcaatgcagaattgactctaatgtcaattaaagtttgtcattttctatagtcattgtatttgggacaattatctcaaaaatgaattttctactgttctgcaaggagtgacctcagactaaagacattgccacacctattccatttgtaagatttctgtccagtatagattccctgatgtctaatgcggtgtgaatgtaaagtaaagacattgccacactgggcgtggtggctcatgcctgtaataccagcactttgggaggccgaggcaggcggatcacaagatcaagagttgagagcaaccaggccaacatggtgaaaccctgtctctactaaaaacataaaaattagccaggcttggtggagcatgcttgtagtcccagctactcaggaggctaggaaggagaatcgtatgaacctgggaggtggaggttgccgtgagccgagatcacgccactgcaccccagcctggacaaaagagtaagacttcatctgaaaaaagaaaaaaaaatgactgccacaattatcacagttgtgaggttctctcccatatgaattctcctgtgttttgcataagatgaagcttgactgaagaccttgctgcaatcatgacatttgtaacgtttctttccagtatgagttcactgatgaactgcaagctatgaacaatgtctgaaatatctgccacatttactacacttgtaagatctctcttcattatggattctctaatgatttgcaatgcttgtagcattactgaggactttgtgagaatcattacatttgtaaagtttccctataccatggattgcttgatgatgaataagtgatgactgcccactaaaggctttgccacactcattgcacttataaggattttctccagtatgaagtctatgatggcatacaaaggatgacatatgactgaaggtcttgccacactcattgcacttgtaaggtttctctccactatgaagtctataatggtatacaaaggatgacatatgactgaaggtcttgccacactcattacacctgtaaggtttctctccagtatgaactctctgatgttgtgcaaggtttgactgttgattaaaaaccttgccacattcattacacttgtaaggtttctctccagtatgaattgccttatgaattagaagggatgaatttcgagcaaaggtcttgccacactcatgacagttgtaaggtttttctccggtatgaagtctacgatggcccacaagggatgacttctgactgaaggtcttgccacactcattacacttgtaaggtttctctccagtatgaagcctataatgacatgcaaggtgtgctttttgattaaaaaccttaccacattcattacatgtgtaaggtttctctccagtatgaactctctgatgttgtgcaaggtatgaatcacgctggaaaaccttgccacattcattacatgtgtaaggtttctcttcagtatgaactctgttatggcgtgaaaggcatgaattatgcctaaaagctttgtcacaaaccttacatttgtatggtttctctccagtatgaattcgcctatgtgtttcaagttgtgatctgcaactgtaaactttgtcacatccttcacatttgtaaggtttctctccagtatgacgtctacgatgccctacaagggatgacgtctgactgaaggtcttaccacactcattacacttgtaaggtttttctccagtatgaagtctatgatggcgtgtaagagatgacttgtgaccgaaggtcttggaacactcattacacttgtaaggtttttctccagtatgaactctatggtgccatgcaaggtattgcttttgatgaaacactttgccacatacatcacatttatattgtttctctcctgaatgggttacatgatgtcttcttaaatgtgagctataattaaaggctttgccacactcattacattggaaaggtttttctctcatgtgttcttcctggatttgtgtcaataatgaagaatggagaaagttcttcccatacctattagaaatatgggttttgagcctacaagaaattctttgggatgttgaaaccaaggaagcattgttgatagacttctccacttgattatcaattttcccttcagtctgaaattcgtgcagttcaggcagatgtgaataaaagcttgatccaagctgatctttaataggcttgtttccagcatgcctttgatcacgtcggtctgtactaccagtcaactttttgatttttgtcatgggtgcttcatggccatttcttttaatttcttgccactgaaactcaaagtcatgaatatctttcttgatttctgggaagcaaaaatctccaatgtgatgacttttatgtctttgcaatgtccctgtgtggatcacttctcctgtattaccgtgccctgttgatgagaactccgtcatggattttaaagagctatctaaaaaatataaagaccaataggtttccaattaagtacagatggtaaataatatttaatactgaaatgtgttaatattacacaaaaagcaatacttattttaaaattcccaaatatgatcttcaaagtttaagaacaccctgtctctattaaaaatacaaaaattagccaggcatggtggtggatgcctgtaatcccagctactcaggacgctgaggcaggagaatttcttgaacctaggaggcagagattgcagtgaacagagatcacatcattgcactccagcctgggcaacaagagcaaaattccatgtcaaacagagttcagtcaagagcctcatatatatgatgcagtaagcctgaatgatgtcctccctaagaggaatttctacagcagtgactgctgtttagagaacatgatcattagtttatgtgatgatcactgtcacagtaccagtgagagatgcttctgtgatgctccttaaaaaccagaacaaaaggccaagggtggtggctcaggtttgtaatcccaacacttggctagaggctgaggtgggcagattgcttgagacaaggagtttgagaccagcctggccaacatggtgattccccatctctaataaaaatacaaaaattagcaaggcatggtgacttgcatctgtaattccagttaggttgggaggctgaggtatgagaattgcttgaatgcaggaggcggaggttgcaatgagctgagatcacaacagtgcactccagcctgagcaagagagggagactctgtctcaaaaaacaaaacaaaacaaaagcagaatcacagctggaaacacttgtcagtcactgtcatgctttctagctcatctcctgggccaccctgacaattctgctcagggctaccaggggcatctctgcttagagcaggatgacgttcaattctattagtcaaagtgttcatgaatgttctgtttttatgtaaaaccactccataggatagtctctaagaagctgtctatgacagacaggaggatcatcactgcagaaaacaatgacatgtacatcaaaagcatgtatgcggcaaaatcacaaaagagaatacaaaaccaggaagagccaagatagacaagggcagattcctcacatcaggagggacattttcctcacccacagactccaggttcctgtagttctccaacatcacggccctgtataaagccctctgtgcagggttcaggcatttccactcctccaaagagaattctatagccacatccctgaaagtcaagcatccctaaaattaaacacacatttcaacaaaacattagggaggagtcattaccttcacacaaaatgagaaaagagaaaataagtattgatttgatccaagacggtgttctgacaaacccacattaaggtatttttgaacatttctttttgtgcagttgcattttattgtactttcccatgatagattttgaaatctcctagtcactgtggaagtctcagttttatggaaaatacaaaaaatatatgtctgggcacggtggctcacacctgaaatcccagcagtttgggaggctgaggtgggtgtatcaactgagctcaggagttcgagaccacccagggcaacatggtgaaaccaagtctctactgaaaacacaaaaacattaactgggtgtggttgtgcatgcctctagtcccagctatttgggaggctgaggtaggagtatagcttgagctccagaggcaaaggttgcggtgagctgagattgtgccactgcaattcagcttgggctgcagagtgagactccgtctctctctctctctctctatatatatatatagccaggcatgggggctcacacctataatcctgtcactttgggataccaaggtaggtggatcacttaaggtcaggagtttgagaccaacctgggctacattgtgaaaccccatatctactaaaaatagaaaaattagctgggcatggtgggggaatgtgcctgtaatcccagctatttgggaagccgaggcaggggaattgcttcaactctggaggcagaggttgtggtaagctgagatgacagcactgcactccagccagggcaacagagcaagtctttctcaaaataaaaatatatgtatgtatatattgcaaataatgtgttttctactaaaaccatgggcttggcttggcatggtggctcacacctataatccgaacacttatggaggctgaggcatgtggatcacaaagtcaagagattaagacaagctgggccaacatgctgaaacactgacactattaaaaacacaaaaattagcttggtatggtggtgtgcgcctgtagccccagctactcaggaggctgaggcagaagaatcacttgaactcgggaggctgaggttgcagtgagctgagatagtgccatttcattccagcctatcgacagagcgagactccgtctcaaaaaaaaaaaaaaaaaaaaaatcatgggcttctccattaatgctctcctggacacattgcaaatcacacctacacacacttcaattaacttcagtcgggacattataagcaaagacctagagaggacacatccacagctactcacgaggctgaggtgggaggattgcttgagcctggagagcagagtttgaagtgatccaagattgcaccactgcactccagcctgggggacacagcgagaccctatcacccccaccctcccaaaagttggaagctcattgaattaagagacaacttcaagaaatcataaatgcaatgcatgaagaaaatgagaaggtcagccaacatacagaaattacgaagaactacacagaaactctcgggctaaaaatacagtaactaaatggaaaaactcaatacatgggttcaaaatcagaatacattatgtaaattaaaaattagtgaaaaggggacaggtgaggtagctcatatcaggaatttgggaggctgaggtgggtagatcacttgaggtcagcagttcggagaccagcctcatcaatatggtgaaactttgtctctactaaaaatacaaagattagctgggtgtagtggtgggctccccactgcactccagcctgggtgacagagtgagactgtctcaaaaaataataaaataattttttaaaaaaggccaggcatgggccaggcacagtagctcatgcctgtaatcccagcactttgggatgccaaggcaggcggatcacctgaggtcaggaattcgcgaccagcctgaccaacatagagaaaccccgtctctactaaaaatacaaaattagccagatgtggtggtgcatgcttgtaatctcagttacttaggaggctgaggcaggagaatcgcttgaacctgggaggtggaggttgcagtgagccgagattgcatcattgcactccagcctgggcaacaagagaaaaactctgtctaaaaaaaaaaacaggcatggtggctcatgactgtaatcctagcactttgggaggccaaggcggggggatcacctgaggttggtagctcaagaccagcctgatcaacatagagaaactctgtctctactaaaaatacaaaattagccgggtatggtgatgcatgcctgtaatcccggctattcaaaaggctaaggcaggagaattgctttaaccatgaaagcggaggttgcaatgagccaagttcatgccattgcactccaccctcggcaaccagagtgaaacttcatctcaaaaaaaaaaaaaaaaagtagtgaataggaaaagaaacaacaacaaagaataaagaaaaatgaagggagtctaaacagactaacaggacaccatcaaggacaccatcctacacattatgaaagtcccaggccaggttctggctcatgcctgtaatttcagcactcacgcctgtaattccagcactttgggaagccagggtgtggggatcacctgaggtcagaagttcatgaccggcctggccaacatggtgaaatttcatctctaccaaaaatacaacaattagccaggtgtggtggtgcgcacctgtaacctcagttacttgggaagctgaggtgagagaatcgcttgaatccagaggcagaggctggagtaagccgagattgcaccactgcactccagcctgggtgacagtgttgggatttactcaagataggggcagaaatattaaagagaaatattagggaaagttatagggaatagtcacaaaccttttggaaggccgaaaggttatatagcttgtaataattgaacaggctgaaggcacccggttcttaccttagagcattaggtcatagggtaaatactagggacaatagaggcttccccagttaagcctgtttaccctacctccattaactaacctttgagccagatggccctctagcgggaggctgaccagggaaattgccccttaatggtatttacttcagatcacagtacctgagctttaatcattcatgaaactactctcttaaccatgctaattatcctcaagtgtgtttactcaaacttctgttgttaattctattctaaataaatgcctggagtgcgagctgctcagggccggctcttggtgtgcaggcgattgggcacccagcaggactggcaaagcagaatatctatgtgtcggtgtacgtttcattcatccgtctgggccagggtccgtgggcagacccccgcagctaatgccctcttgtgaggagcaatacctcagttgatgtcctgtgtgaggaaagtcagggatctgcagaaacagaccccccacagttcaagcctctcttgaggcaacctgtgaaggaagcgtgaggaccgccctcttgaggaaagctgcgatggaagcatgaggaacgcgacccccgaaaacaaaggcaaagaaggatttcgtggtcaagccagtgagtaatcagtaagtcattggtgcccactcgaggttaccaccttctgggggaagttgagtcaagctaaggtttcatcacgggacaatagttgtcagctcaacagaaacggtatataaaaatgttcagacagttgcttaaggctactggtcggaaacacagcagaactagcaaaacggaattatctgtgtgtcagtgtatgttttattcatatgtggtttaggtcagggttgacatgcagatcccacagctaatgctctcttgtgaggagcaatacctcaacagagcaagactccaactcaaaaaaaaaaaaaagagtaccagaagtcacagaagtgagtgagaagaagaaaggaacagaaaagcttgttggaaggcataatggcaaaaatttctaatttcaggatgcaaaagaaacaaattcaacaccttaagaatatccaacatggataaatctaagtaagagacctataacaaacaacatcataataaaactgtcaaaattcagagatagagaaagaatcctaacaacagccaaaagaagagctaactctcacccaagagggagctcctgtaatattatcaagatatttctcggctgggtgggcggtaactcacgcctgtaatcccacgaccttgggaggctgaggcgggcagatcatgaggtcaggagttcgagaccagtctggccaacatagtgaaacccatctctactaaaaatacaaaaaattagcggggtgtggtggtgtgcgactgtaatcccagctactcaggaggctgaggcaggagaattgcggtggtaagaccatggtggtaagaatcatggtggtaagaccacagtagtaagctttgcttaagtgagtgggaaattttgcatagtcttagtcagagagggcacctctgcagctgggggtagggatggaatcttcccacatctaaaagaggaaatggcaaatccaagaagaagcaatcagttttcaatgccccaacttgcaggaaacttccagatatctgcagtgaagtcaccatgctcacaggcagccagtgtgttattcttagcaacagtgaaaaactgtcaaggagattaagtgaagtcagggatttgagaccagcctggccaacatggtgaaatcctgtctctattaaaaatacaaaattagcccagagtggtggtggacacctataatcacagctgcttgggatgctgaggcatgagaatctcttgaccctgggaggtggaggttacagtgatcccagattgctccagtgaactccagcctgggcaataaagggagatagaatttaagatgacggggactgagaaaagccttgggtgagtgcgagcaaacttgtgacgcaggacgcttcagactcacggaagtctgcctactacaatacctggtatatcagaaaagagagagaagaatccactgaggaatatcactttacctgaggaagagccatccttgtctccttttctttggtcttcttggtggctttctcatgtaacatgagtctttggaaattaattctgtgtgagaaaaaaatatgatatttaattaattttttttgagatggagtccagctctgtcaccatgatggggttcagtgacatgatctcgtctcactgcaacctctgcctccccagttcaaggaattctcttgcctcagtgtaccaagtagctgggattcaagccatactccacgatgcacagctaatttttgtatttttagtagacatggggtttcatcatgttggccaggagagtctcaatctcctgaccttgagatctgcccacctcagcctcccaaagagctatgattacaggggtaaaccaccagacccagctgagatttaatgtttagaaaccacacattcctttcctgtgacaaaacatacacaggggagaccttacccggtataaagactgtcctctactgcccactgcaccagagatcatgcagagataagaaagccccacaggaagacctacaagggtaattttgacccattttcagatcttgctccctcctgaaaatgtccacacacacgctgaagcagggcacagaccttcaggacacagatctggccctaaccaaaccccatgcagagcacagccccctcacctccctgtggatcacagactgacctcagttctcaatatgggggaaactgccttgatgttcaatgctggacacagatgagaatcaccagcgccatcgtattattgagggtgtgtcccatcctatgataatagcaatctttgatagaatagcataaaagatgtatttgcaaaatgcctgagaaacctaatgtgaagtcagggttgagctccactcagagggtaccagctgagcacagccccaccttctggctctgctctccccttggggacttgttcccaccaggatccagtgaacagcgaaggagctaaaagaatcacacagaacaggtaacatggaccagaggtgggggtgaaggtggggctgcaatgtcaaatggggcctgtgggagatcacaaaggttactgtagataaagtgatgtcacaacaaagacttagggaagaaaggctgcttgtcacttgcagctgatgggacagagagtcctaggccgagggacagcccaggtgaaggccctgagacaggagcaacctcagccccagaaaaaggaaagaaacctgcgtggctggagcagagggagtgaggaggacacaggcaggagatgagatcagggaggtcctgggagcacagatccatagggatgaggtcttgaaatatttttctcccacacttcaaaagaattttggaaatgatgtattttctcacgcctttcatgtatacacacaacttttctttacgttataaattacaacatttacaaataatggaattcatttctcattttaaaaatacatgctgtcaagtttggctaagtccccagaagtaccctgtcaccctcatctgagacatgtaggactgcaagggaatgtgttcaggggtttaggaagtcacctatggaaatgtgcatttggagacgcctgtttaatatcccagcagagagctgaggagccaactgaacacaggattgcagagctcaggggagaggcctgtagggaacatggagtcgtgtaggtgggttaaagttgtgaaatgacacgatatggaagggcagtgggtgtggacagagacaaggagaggttcaagatgatctgagtctaattacctgttttttccattctggtacttgtgttttttatatttttggagaacagtaacttatttaaaattcatattacacctgagcattaccatctcgtatagaaaaagccacaaactatttggccaatcatttcaggggtcagtgtcactctgactgagcttttcttgtcttattcctcacctgtatattacagatgggggtcactgaggttcagagtaggagacatttcaccaagttatccagagaagctctgagttgagtcagaaggaggtgcggctcattcctatgtgatggactggaagggccaacagaatgtgttggttttttctctagaaaattgcaggatgggccaggtgtggtgactcatgcctgtaatcccagcactttgggaggctgacaggggtagatcacatgagcccaggagtttgagaccaacctgggcaacacggtgaaatcccgtctctatgaaaagtacaaaaaatagccaggcatggtgatgtgcatctgtggtcccagctatttgggaggctgaccagggaggatcacttggacctgggaagcagaggttgcagtgagccaagatcgtatcactgcactcaagcatggctgacagagtgacactccatctcaaaaaaggaaaaaaaaaattccaggaccatctgttatatacctgagcaaaagaaatgtctctttcaatgtctaaggtcctgatggcatgaatcctaaacatgcaattattttcccagaaaaatgacagtaatacgttcaaaatacacacaattgtgaacccctagctataggtatttaaaacactgaaagagaggcagtggtagaaatgagatctgagcaaatgttttcttcatgaacacatggactctgctggaacaaggttctaagtcaatccagcccatccttcaacatctgcaaagaatattatggaccagaggaacttgaggaaaatgtttacttagaggctcacagctcaccatttaatcagatgacatgaggaaagaaaatggagtaataggctacttgaactaaattttgatgttagtgtaaagaaaaaatttccttgatatctttattgagtacacattgaaacaacctaaaatcatttatcaggtaccagaaaatgtttccaatacataataaagactagaatgcaggcagtgctcaatctaaactgaacacaataaatttcagagaaaaacaattttaaaatggttaaaaaatatacatctaatgaaatgtgaggtcaaagaagaaaattcaaaacacatataatagtttgaaaatgataatgtgatgtcgtaagattctaccaaagcttatttgagaagcagttatttattttactttattttattttattgagacggagtctcgctctgttgcccggctggaatgcagttatgcgatctcggctcactgcaacctccacctcccggattcaagctattctcctgcctgtctccccagtagctggaattacaggcaagcatcaccatgctcagctaatttcagtatttcagttgagatgaggattcaccatgttggccaggctggtctcgaactcctgaaattaggtgatccaccagccttggcctccaaactgctgggattacaggtgtgagccactgcaccaggcctattttttttttttttttttaattaagaacaagctgggtgtggtggctcatgcctgtaatcccaagactttgggaggccgatgcggctggatcccttaagccctagagttcgagaccagcctgggcaacatggagaaagcccgtctctatgaggaacacaaaaatttgccctatgcggtggcatgtagctgtggtcccagctactctggaggctgaagtgggaggatccgttgaacccaggaggtttatgctgcggtgagctctgatcctgtaacagctctccaacctgggtgtcaaagtgagaccccatctccaattaaaaaaagaagaagaaggaaccactgggtcctgggtctaggggcagggaatctaaggccaattaacacgaacttttaagtccacgccatctgcttctgggtctgtgccaattagggcaggacaaaagccaggactggggggtggaaccccaggaggtgagccgggcctgagcaaggccaggaagggatgcagattaagtgggtggggcctgagtgaggccagggtggggcatgaaggacaaggggcctggtgtgggggggtgaggggggaagaggcctgggctgtgaggggttcgcaggggaatgaaggggtcagggcctgagcttccctctatctcactctccgtgtttctgttttccaggttttgaaggcgaaacccaccagtgaggctggaacagctcaggagtcagggaaatagtacctccctgagaagtgaacatggggtggtaattagatccaggaaagttccttactattgaaattaattttagcaatttaattccaaaacctcaaagttgtctagggcaggaatgcaaactagaatgcgaaatgcaaagtcctgcctgagccaaatgtacaattttatgctgacggcccacagaaccaattagaaatcctctccctttctattcttcattcactggggtgggagagtccaccctgtgctcagctccagagactttcctagagccactgcctggggtggggagcagagggctcaggccagggaggagtgaggtcaccacctgctgcttaaacacagcagggatgtgggtggggtggtgggagccaggagtcccagctactcaggaagcaggggtaggaggatagctgagctgggaagtccaggccagcctgggcgacaaagtaagaccctctaccccagagttccctcctccgtctcaataagaaaaaaagtgattaaaaaaaaaagcactgaccttgtaacagtgcatataaattgcccagttgttccttacatttgttattttatgctgcacttgttagatatgagttctaaatttctcttcaaagaatcaatgtgtcagtatgtgcaattatttgccttctacttttaaacttaacttcctcataaagcaaccttttttaatcacctgctccaccctgagtaattctccaacctgactcattccataatcatttttcccaccaaaccactcaccccatcactctttttaaattagccaatcggaattagcttagcctgtgcggtctaatcctagccgataggggaatgacacagcagcaggggcctcatgcgtctggagtaagaaccccttcctgtcccttgcccaagtgtgcactcaccattgctccatctatgaggacgcacccttctatagaagtaaattgccttggccatgtgcggtggctcacacctgtaatccccccactttgggaggctgaggtgggcaaatcacgaggtcaggagattgagaccatcctggctaacagtgaaaccccgtctctactaaaaatacaaaaaaaaaaaattagccgggcatggtgatgggtgcctgtagtcccagctacttggaagggtgaggtgggagaatggtgtgaacccgggaggcggagcttgcagtgagccaagatcgcaccactgcactccagcctgggcaacagagcaagactccatctcaaaaaaaaaaaaaaagaaagagacagagagtcaaagagagagagagaaagagacagagagacaaaaagggagtcaaagagagagggagaaagagacagagagtcagaaaagagagagagagagtagtagtagagagaaaacagtataccctattcctttaaaagccagggtaaatttaaaacctataattgataattgaaggtcttctccatgaccctataacactccaataccaccctgttgtcagtgtaaacaatggcatatcctgaaagcactgaggccactgacaacccatagcttacctatcaaaaatccttaacccagtaaaccgcggatggcccaaatgcattcaatctgtagtggcaactgctcagctaacagaagaaacagaaaaataacttttagaggaaacctcattgtgagcacacctcatcaaggaagaactatcctaagtcaaaaaaaaaaaaaaaaaaaaaaggcaaaatggtagcttactgactcaagaatcttcaagtatgaggctattctggtagaaaaagatgatttaacattaaccactgaaaattccattaacccagcaggttttctaacagggggtctaaatcttaattatttaccatgcaaaggtctgaccaggcctaggaggaactcccttccagacaggactatacagggtttctcccaggtgactgagggaaaaagacataatgggtattcaataagtgataaagaaactcttgcagaagcagagttaggaaaattgcctaataattggactgctgaaatgtgcaagctgtttgcactcagccaaactttaaagtagttacagaatcaggaaggaggccacctataccacttctaagttaatatggactgaacaaggtcttattaatagcaaagaattgaaatcccaaacttacaacgttttcaacgaaagtcaagtttgctaaaagttaacattgtaacatgtattatcctaacttctaatcttgtgaccttaggcagtctagttcacagacatgaaggaagttcactttgggaaagaatggttatcatctttgaaaaaaaaaaaaaaaaaaaggaggaaggagaatttatgtaaaaagaatgttatatggtaaattcttgtcctaaaataaatcaaatggtggtttaaagaaagggatgtttgcaacaattcagaaagttgaggcatgttgaagaattgtctgtcaaagttgtgaaaaaagaaaagttataagagggaatttatgcaagaaatgtcatataatttgaaagtaattagtcctcctgattgtaaaactgttgaagaaacagtttatgtgcaagttgtgtaaggaaagtaaaatatacttttggtaaaaggattatagggaggcagaagaatgtggatttttacctacattgaaagattaaaaaaatttgttttaaaggtttaagcaagtttcaaaatgttaattgtaaaggaaattctgtgtgtaaacatactggcaaaagttaaaggggtaatatccagtttttctgtgaactggatattaaaataaaagcacaaccagtttttcttaaagcactaacatgctcttcaacaaaaattataaaaggttaaagagtctataaaaatcttaccttatggtcagacattaacattggataaatatgtctacaaggttttattaaaattaagtttaacattaataaaacactaatataaaggtgaaatgtagcttatctggtataaaaatcatacatgaagtgttaaatataaaatggtatttggctttctttggtctaaaaactaataaaaataggtgctaaagaaaatttctcagcaagaaggcaccaaggattataaagtccactgctgatgtccccacgtttaaaacaaatgataaatttcttagaaattatatacttggtttatcctccaccttctcttcctttaaaacaagagtctctcagcacaggcgccagcttcggagtttccagtacatcagcatcggcctggggatgacgttctcatcaaaggatggaaagaatggaaactcgagccagcctaggaaggaccctatcttgtgctgctaaccactgagactgctgttcatacagcagaaagggagggacacatcacacctgagtcaagcaggtgccattatcatcagaatcatgggccactgttcctggatcaagccctaccaaattaaagctaaggaaagcttagtctatctatcttttcctttcctttcctttcccagtgcttatatccattactattcctaccactagcaactctaacccaactttagagcatttctatggtttaggagcagaggtcactggaaaggatcctataggcttctttagggtgtgcttttttctccctcctccacctcctacagctgcccctttcccaaatctatgaaatcaaactatgacatgcctcgtgccaaatgacaaaagcaagttctcagtagtagaaataggagacctaaggcaaaccatagctattgaaacagggtataaagatgtaaatgcctggctaaaatggatcaaatattccctctgcatgttgaacaaaggcaattgttatgcttgtgcacatggcaggccagaggcccagattgtcccctttccacgagggctgtcctccagtagaccaggtgtgggctggatgctagctcttttccaggattctacatcctggggtaacaagttatgccaagctctctctgtctgctatatcccaaagttcgacaccctgtgggtcagccctccagggccatccagcttccaactcccaacactaagttcactttatgtccctcatgacagggaggaaacttaacattccttggagacctgaagggatgcagagagcttaaaatttttcaaaagtttaccaatcagccactctttattcatccctgagcagatgcatagtggtattatggtggacctttactggacactttactgagtaactgaagtggcacttatgctttagtccaattggctatccctttcaccctggcatttcatcaaccagagaaaggaaaaataagacaccataaagcaaaagaagtcccttatgggtcttttgactctcacgtctatttagacacaattagagtcccatggggaagactagatcaatttaaagcccaaaatcaaatagctgcaggatttgagtcaatgttttggtgggtgacaattaataaaatgtaaactggataaactaatctatgacaaccaacagctatctattaattacactagagatgctgttaaaggaatagctgagcaattaggggctaccagccagatgtcttgggaaaatgggatagcctttgacatgatattagcataaaaaggaagagtttgcatcataattaaaactcagtgttgtaccttcatcccaaacaacactgcgcccattgaaagtaaaacaaagacattgcaaggtctgactgctctgtccaataagttagtgaacaactcaggggtaaatgaccccttttcaggatggctagaaaagtggttcggtagatggaaaagaatagtagcctcaattcttacttccctcacagccgtaatgggtgtacttattcttgtcaggtgctctgtcacaccatgcatccgtgggttggtgcagaggctcataaaaatggcagttactaaaatctcccttaactatcctccaccttatccaaagaagcttcttcttattttggaaaatcaaaccgaatgactaagccaagacatgttaaagaagtttgaagagaaagagctgtaaggaaaatgcaagagaagggaatgttagatatgagttctaaatttcttttcaaagaatcaataagtcagtatgttcaattctttgccttctacttttaaacttaacttcctcataaagcaacctttttcgatcacctgctccaccctgactcattccaatcacctgctccaccttgactcattctgatcacctgctccaccctgcctcattccaatcacctgctccaccttgactcattctgatcacctgccccaccctgactcactccgattacctgctccaccctgactcattctccaccctcattccataacatttttcctgccaaaccactcaccttgtcactctctttaaattagccaattggaattagattagcctgtgtggtctaaccctcgccaataggggaatgacacagcagcaagggccatgtgcatcagaaataaccccttcccctcccttgttcaggtacgcactcaccattgctccctctgtgagggcacaaccttctatataagtaaattgcctttctgagaagaaaaaaagaaaattttatatttggtgctatttcttttgcagcaccgaaactttatttacaacacacttaaaatgagttatatttgtcatggaaaagagtcaaactctgtaaaatattttaaaatatttattctgcactaaatatgaataatcatggcccatgacacaactctcaggaggtcctgagaacatatgtccaaggtgatggggaacagcttcttcttagacattttagggaggcattagacatcaatcaaatacatttaaaagatgcattaattttgttcagaaaggtgggacaactcaaagtgggagcttccaggctacaggtaaatttaaacattttctgattagaattggttgagtttgtctaaatacctgggatcaatagagaggaaatgttcaggttaagataaaagatgttggagaccaaggttcttttgaagtcctctgctggctgccttcagagaaaatagatgatgaatgttttttattcagacctttaaaaggtgttagatttttagttattctcttcaggattggtagggcctagaagaaaaagatctagctatgttaacagagattctttgcagacgcacatgaacccctcacaaacgatacctttgaaggaccatttcaaaatatggcacagaaacatgttttgaggtcaaatattttgactttcttctttgccatatgttttgtggtttgtaaggcatgaccccctagactctttacataggaatttggacaagataaaaaaatcagagcttacacctcattctcaaatacttttttttacagttcttccctgcaatataactacttttacgataaatgttgttgacaacataatatgctaacatcaataatttataaatgtattgtaatattaaattcactctatgtgccttctgaaaaaattagaaaatgtaccttttatcttcaagttgtactttttttttttccttcagacaggacctagttctgtcaccccggctggaatgcagtggcaggaacactgctccttgcaccctcaacctctggtgctcaagcaatcctcccgccacacctcccaactagctggagctgcaggccctcaccaccaagcctggctaatttgttagtactttgtagaggggtggtcccactatgatgctcaggctagccttcaactcctggactcaagcgatcaacccacctttgcttcccaaagtgttggggttacaggcaagccaccacacccatccaattgcaatctattttaggtgttttctttgttattctctcctgagtgttctatcaggtgggaataacaaaggctataaaatatgcagtctttaaatgttaggatttattttcatatagagaaagatcatgaaatattactaagaatacattgcagtcaagttattccgttttacttgggccctgaaaaaatataactaagttataaaattggctgggcacattgactcacacctgtaatcccagcactttgggaggtcgaggcaggtggatgacccagaggtcaggagattgagactagcctggctaacatggtgaaaccccatctgtactaaaaatacaacaattagctgggtaaggtggcacaaaactgtaatctcagctactcaggagattgaggcaggagaatctcttgaatccaggaggcagaggttgcagtgagcaaagatctcaccacagctctccagcctgagcaaaagagtgagattctgtctcaaaaaaataaaaataaaaataaaatgaaattataaatcacctcatttctgcatgtaatacttttatgactatatctgtaagttaacatgtactatgaactatgtttttctcccacatccctagctatggaagaattcatctatcaaacactagtaattagctaaaatatgattacatttagaagggaaattagcatatctagaatattagcaagtttaaaaaagcataatgtcgtcaggcatggtggcttgtgcctgtaatccgagcatgatgggaggctgaggcaggaggatggctagtgcccaacagttggagtccagcctaggcaacatagcacctcatctttatgttttaaaaattaattaagttacttatttatttttgagattgagtttggttcttgttgcctaggctggggtgcaatggcacggtctcggctcactgcaacatctgcctcctgggttcaaatgattctcttgcctcagcctcccaggtagctgggattattggtgctcgccatcatgctgggttaatttttgtatttttagtagagacggggtttcaccgtgttggccaggctggtctccaaatcctgaccttccaaagtgctgggattacagacatgagccaccgtgcatggcaaaaaagtttattttaatcagaaataattaataaatagaacatgataatgggtacaaaaaatagaataagacctattatttcataacacaacagaatgactgtagtcaatgattaaattgtacatataaaaatggggatggccaggtgtggtggctcaaacctataagccctgtctctaccaaaaatacaaaaaaaactggatgtgagcctgtaatcccagctactcaggagactgaggcatgagaatcacttaaacccagggagcagaggttgcagtgagtggagattgcaccactgcattccagactgtgcgaaagagctggactccatctcaaaaaactaaacaaatggctgggcacagtggctcatgcttgaatcccagcactttgggagccaagatgggtggatcccctgaggtcaagagttcgagaccagcctgaccaacatggtataaccctgtctctaaaaaaatacaaaattagccgagggtgatggcgcatgcctgtaatctcagatattcaggaggctgtggcaggagaatcatttgagccaagaaggcagaggttgcagtgagctgagatcgcaccactacactccagggtacacaagaagagtgtaactccatcacacacacacacacacacaaaatgctataaacagaacatcagaaaaaaaatatagaaagtcacatgtatttaaaaaccttaagcttttgaaagctgttttcccaagtaatcaaaaatgagccaataacgatgcaaatattatctttttgttttttgttttttctggagacagagatcatgcaactgcactctagcctgggtgacagagtgagactccaactcaaaaaaataaataaataaaaaattattaggccaggagcagtggctctttgggaggctgaggtgggccaatcacctcaggtcaaaagttcgagaccagcctggtcaacatggtgcaaccctatctctactaaaaatacaaaaaattaaccgggcctggtggtgtgtgcctgtaatcccagctactagggaggctgaggcaggagaattggttgaagctgagaggtggaggccgcagtgagtcgagatcatgccactgccctgcagcctgggtaacagagtgagactccatctcaaaaaaaaaaaaaaaaaaaaaaattaccaatgtcaactgaacttggaaagcaccacacatttgcacactcacacagacacaaccctctgatatggctctagaccaaatccacaggttaaaaagccctcaaatgaactcttgggccttaagcctttcaaaagatcacctgtttcctgtgaggttggggctgtggccctgatgtgtgaagacttaggaccatcctgtcatcatagaaaccctaaacaaaataaagaaggaaatttacctcaacaatataaaagaccatccatgaaatgaccacagctgaaataaccaatcaggaaaaattgaatgcttttcctgtaggatctcacatgatgctagaacgttctcaccctttctattcaatcaatactgactgtcctagccagagcaatgaaatagcaaaagaaatcaaactcatccaaatcagaaagaaataaataaaattttatttgtttgtagatgacacgatcctctgtgtagaaagtcacaaagactcaaccaaaatacaagtggaactaataaacattcagtggatttgcagagtacaatattagcaccaaaattagttgaatttccatgcaataacagtaaaaaattttaaaaggaaattaagaaaacacttccattttctagagaatttaaactaagatatacttaggaataaacgtaaaaatgcgagaagtttctaccttgaaatctatgaacattgatcaaaatgattaaaaacatagagatacaaccaatattgatagattggaaaacttaatctcgttaaatgattatacaacccaagatgatttagatttaacacaacgcccatacaaatccctatcagtttttgtcaaagaaacaaaaaaccggctgggaaaagtggctaacctctgttggccaggctggtctaaaacttctgacatcaagtgatctacccaccttgggctcccaaagtgctgggattacaggcatgagccaccacggccagctactctaagctatttctgacaagacagtgaaatgagtgacacaggaaaaggggcatctaatcaccaatgtcactgaaggctgacaaatcttattaaacaaaggaagttcagaatctgtactataaagcttgcgttacttgaagccatctaatagcattaacttgttttaaaaacctgggggcaaattaacattacttctcaaataaggacaccaggcccacagtgttcatgtacttcaccccaatttgcatgtacggtaagtgagggacaagacttgatcctaggcctgaaggatcccacgacatgtacttaagcacaatagtatgcccaggcagtacaggaaatgaccagtcacagaaaatacaagaacagaaagaaatatatcaagggggatacaagggctgagctgggacacaagcgctgagctgcgctgctgacagtggttctgaagccatccctcatggatcatgtgctgagtcatcataccctgcacacactgatttaagcggcctcctataattttgtccagtggatgaacaaggtcttgacttactcagtgagagtggtgttggaggggatgggctcacggggaaattggggtgttcagcattacaaaatcgataggctgaaaagaaacagtatttgcatccagatcaatgtaccatgtgatgcaaggccaggaaaggaagggcaagggtggagggcagaagtaatgggcatgtaggagtgaattttgtgcatgcatgtctgtgggaatataattccactaggatagaccaaatcttgagcttggacgaaagtggaactaatttagcaaatggtaaaatattgaccagaggttaactatacaaattacaatatgggcaaaggacaagaatgaacgacattcaggccaggtgcagtggctcatgcttgtaatcccaccactttgggaggccgatgcaggcagatcatgaggtcaggagttcaggacagcctgaccaacatggtgaaaccctgtctctactaacaatacagctctcgctctccctctccctctcccgctcactgcaacctccctgcctgattctcctgcctcagcctgctgagtgcctgcaattgcaggcgcgcgccgccacgcctgactggttttcgtatttttttggtggagacggggtttcgctgtgttggttgggctggtctccagctcctaaccgtgagtgatctgccagcctcggcctcccgaggtgccgggattgcagacggagtctcgttcactcagtgctcaatggtgcccaggctggagtgcagtggcctgatctcggctcactacaacctccacctcccagccgcctgccttggcctcccaaagtgccgagattgcagcctctgcccggccgccaccccgtctgggaagtgaggagcgtctctgcctggccgcccatgtctgggatgtgaggagcctgccccggcccggctagcctccccgtccgggagggaggtggggggcagcccccgcccggccagccgccccgtctgggagggaggtggggggcgcctctgcccggccgcccctactgggaagtgaggagcccctctgcctggccaccaccccgtctgggaggtgtgcccaacagctcattgagaacgggccaggatgacaatggcggctttgtggaatagaaagcggggaaaggtggggaaaagattgagaaatcggatggttgccgtgtctgtgtagaaagaagtagacatgggagacttttcattttgttctgcactaagaaaaattcctctgccttgggatcctgttgatctgtgaccttacccccaacccggtgctctctgaaacatgtgctgtgtccactcagggttaaatggattaagggtggtgcaagatgtgctttgttaaacagatgcttgaaggcagcatgctccttaagagtcatcaccactccctaatctcaagtaatcagggacacaaacactgcggaaggccgcagggtcctctgcctaggaaaaccagagacctttgttcacttgtttatctgctgaccttccctccactgttgtcctatgaccctgccaaatccccctctgtgagaaacacccaagaatgatcaattaaaaaaaaaaagaaaaaaagaaaaaaaaataaaggaagaagatacaatcaaaaaaacaaaaacaaaaacaaaacaatcaaaatcagcctgcagttcacaccacaaagcatgagtgagactgggctggaagttggtgaggggcattttgcttttgaatattaaagacagacaaattgagaagtaaaaaaaaaaaaaaaaaaaaaaaacaaaaattagccgggtgtggtggtgcatgcctgtaatcccagctactcaggaggctgaggcaggagaattgcttgaaccctggcagtggaggttgcagtgagctgagatgtggccacttcacaccagcatgggtgacagagtgagactctgtctcaaaaagaaaaaaagaaaaagagatccaaaaaatcagcagtatggcggtctgaggtaaaagcagttttacgtctcttaaattaaatggcctctgatttccagtgtcaaatgaatactcaacaaaatcccccttgtagattgcagaattgtgtatacacatgaaaaaatgagtaaactctatgaagagtacagcaatgggggagaccacaggcgtgaagaatgatccctagctgagtaggtagagatcggtttgtgaaaaaagagccaggccagaggggatggctcatgcctgtagtcccaacactttgggaagtggaggtgggtggatcatgaggtcaggagttcaagaccagcctgactagcatgctgaaaccccatctctactaaaaaaatacaaaacattagctgggcatggtggcacgtgcccatcatcccagctgctcgggaggctgaggcaggagaattgcttgaacctgggagtcggaggttgcagtgagccaagattgcaccactgcactacaacctgggtgacagagtgagactgtctcaaaaaacaaaacaaaacaaaaaacaaaacaaaacagacccagatggagattgttgcctacatgtgtgattggtcaaattagtgaagaaaaacaataatgcgctaactaaaatggttgcatatgaaaattagaggataaggccaggctcggtggctcaagcctgtaatcctagcactttgggaggtcgaggcaggtagatcacaagatcagtagttcaagaccagactggccaagatggtgaaaccccgtcttactaaaaatataaaaattagccaggcatggtggcaggcgcctataatcccagttacttgggaggctgaggcaggagaatcacttgaacctgggggacagaggttgcagtgagctgagattgcaccattgcactccagcctgggtgacagagcgagacttcatctcaaaaaaaaaaaaaaagaaaaaagaaaaaaaaactggagggtaaatcttgtttcttatgtaaaaacaagggtgtctcttttcctggttcctatattatttgaagtcatatccctggacttttaaacacaatctctggaataaatgagacatgaaaagtgaaggtgacagactagcaaatgccaggccctcatatcctcatggagacaccaactcaacaaaaatgtttcatcaaaaatatctttgtaggccaggcatggctcatgcctgtaatcccagtactttgggagaccaaggtgggtgtatcacctgaggtaaagagttcaagaccagcctggccaacatagtgaaaacctgtctctactaaaaatacaaaaattaagccaagtgtggtggtacatgcctgtaatcccagctactcaggaggctgaggcaggagaatcacttgaacccaggaggccaaggttgcagtgagctgagatcacacaactgcctccaccctgggtgacagagcaagactccatctcaaaaaaaaaaaaaagaaatgaacactaaaatatagggatttcattcaacctcacaagctcccttaataagattgatgaaaaccatatctgttacagggttgattctacaacaaattgaacaaaggttttcttgttaaaaatgaacagtgacacatattggtgtgaaaaatgtgaaatgaacaacagttcagtcaagagcctcataggaggctgtgagcccaaatgacatcctcagtaggaggaattttaacaccactgactgctgcttagagaagacgatcattagtttatgggatgaacattgccacagtgccactgagagaagcttctatgatgctcctcaaaaaccagaatggctcaggcatggtggctcatgcctgtaatcccagcactttgggaagccaaggtgggtgggtcacctgtggtcaggagttcaagacaagcttgggcaccaagatgaaactccgactctactaaaaatacaaaaactggccaggtatggtggagcatgcttataagccctgctacaagggaggctcaggcaggagaattgcttgaacccagaaggtggaggttgcaatgagcacagattgcaccactgcactccagcatgggtgacagagggagactgtatctcaaaaaataaataaataaaagaaagcatgacagctggaaacacttatcagtcagtgtgatgctttctatctcataacctggtccacgctgacaattctgctcagggtttccagggcgcctctgcctagagcaggatgatgttcaatcataacagtcaaagtgttcttcatgaattttctgtttttatgcaaactcactccataggggagtgcctaacaagctatccatgactgataggagggtcatcactgcagaaaacaatgacacgtacatcaaaagcatgtatgggggctgggcacagtggctcacacctgtaagcccagcactttgagaggctgaggcgggtggatcacctgaggttggggttcgagaccagactgaccaacatggagaagtcctgtcgctactaaaaatacaaaattagccaggcgtagtggcacatgctggtaatcccagctacttgagaggctgaaggaggagaattgcttgaaccttggagacagaggttgtggtaagaagagatcacaccactgcactccaccctggacaacaagagggaaactgtctcaaaaacaaacaaacaagaaagcaggcatggggcaaaatcacaaaacagaacacataaccaggcagagccaagatagacaagagcagatttctcatgtttgcagggacattttcatcacccacagactctaggtacctgtagctctcccacatcacttccctgtataaagccctctgcgcagggttcaggcatttccactcctccaaagagaattctatagccacatccctgaaagtaaaatgtccctaaaatgaaacacacatttccacaaaacatcatggaggagtcagttatcaccttcccacaaaatgagaaaagagaaaataagtactaatttgatcaaagactgtgttctgacaaacccacgttaaggtattttggcacattttttctccacagttgtgttttattgtacttttccacaaaatattttttttttttttttttttttttgagacggagtctcgctctgtcgcccaggctggagtgcagtggcgcgatctcggctcactgcaagctccgcctcccgggttcacgccattctcctgcctcagcctcccgagtaactgggactacaggcgcccgccactacgcccggctaattttttgtatttttagtagagacggggtttcaccgtgttagccaggatggtctcgatctcctgacctcgtgatccgcccgcctcggcctcccaaagtgctgggattacaggcgtgagccaccgcgcccggcctccacaaaatattttaagatcccttaagtcactgtggatgtctcggttttatggacaatgtaaaaaatatacaaataaaaaggaaacacagggcttggtgtggtggctcatgcctgtaatcaaaacactttgggaggccaagccgggcagatcatttgaggtcaagagttggaaaccagcctggccaacatggtaaaacctcttctctactaaaaatataaaaagtagccaggcatggtggcaggcacctgtaatcccagctacacaggaagctgaggtaggagaatctcgagcccaggagacggaggctgcagtgagttgagatcacaccactgcactccagcctgggtgacagagtgagactttctcaaaaaaaaaaaaaaaaaaaaagcaaacgaacatagagttttctctacagatagtatgttcaacataacaggtgatattcattacctagatgagctgaaatacaagtggtgtctagagaggacaaagtccaatgaatttgatagaaaagaaaagagagtaaagtccaaaactgaaaactgttgtgatgacagcaatagccatgaataacatttttgaatgcttcccatgtgctatacactgttctaagtgcttcccatgtcttaagccataaaataacatactgtcccatgaagaaagatctgtacttggagacaagtgcatcacacatactaggaaaattaccacaaatcaaatagctaaaaatgtcaacacaagcactgaatccagatgtctgggattcagatttgaatataaccacctaagtaaaagatacagcttcaaaactaaactgacacaggtttatctaatggagagaacatgaaataggttcaagggtaagaacatggagcatcctacaaggtcattgaatggacacacagggcatgaatataatactgtacaatccttcttactatttttccttttaagacagagtctcactctgtcaaccagcctgaagtgcagtggcacaatctcagctcactgcaacctcgtttgcccaggtctaagcaattctcctgcctcagcctcccaagtagctgggattacaggcacctgccaccacacccagctaatttttgtatttttagtagagacgaggtttcaccatcttggccaggctggtattgaattcccgacctcatgattcaccctcttcagcctcccaaagtgctgggattacgggcatgagccaccgtgcctggcctgtttttactattaactcattattgtgatagttgacaacaatgaaaaatacttaaaattattaaaattataaaaaaaaaacttattgcaaatgatgtgttttctacgtaaccatggacttatccatccatgtattctcccaagatgggaggatccctagaggtcagtagatcaaggctatagtgagctatgattgcaccactgcacttcaccctggacagaataaaaatacaatataaaaaataattctggaagtggtggctcatgcctgaaatcccaacactttgggaggctgaggtgggcagatcacaaggtcaggagttcaagaccagcctggccaacatggtgaaactccatctctactaaaaacacaaaaattacccaggcatggcagtgcatacctgtagtcccagctactcaggaggctgaggcagaattgcttgaacccaggagtcagaggttgcactgagctgagattgcaccactgctctccagcctaggcaacaaagcgagactccatctcaaaaaacaagaaaaagaaaaagaaaaagaaaaagaaaaagaaaaagaaaagatgtagctatgtgtggtgacacatgcctatccttctagctctttgggaggctaaaatggggatcacttgagcccaggagttcaaggctgctgtaaactagaattttgccattgtactccagacctgggccacagagcgacaccttctctctctgtctctctttttttttctagatggagtctctctctgttgcccaggctggagtacagtggcaccatctcggattactgcaacctccaccttccgggttcaagtgattctcctgtctcagccttttgagtagctgagattataggcatgtgccaccacacccagctaatttttgtatttttagtagagatgaggtttcaccatgttggccagctgctctcaaactcctgacttcaagtgatccacccgccttggcctcccaaagtgctggcattacaggggtgagccaccacagccagccccacatttacattatggcatcttgacttgatcctcagctcctcagctgccctgtgactctgtgtgtgtgtgtgtgtgtgtgtgtgtgtgtgtgtgtgtgtgtgtgtgtgtgtatgctcacgtgttgtgacaggcaaggaaaagccagtagagcatcatcgccactggcctggcaggaggaggtggccctcgggctgcagttcactgtgctgtttgcactctgattcttggaagaatctttcctgaagtcacggagcctccagctcctccggaacagaactagttgtgtaggagtgtgtccttcatgcccctcaggtccctgaccttctccccacccttcctgaagggaatccaaagggaagggcaaagtccctgcccataatggccaaactgggtcctggtgatgtgcagagcatggaagacctgggagctggagtgaggcagttcacacagatgacaaaaatggagatgcctcaggactggctgaagatgcagggtctggtctgtagggcttttctgaccttagagaggccttctcctcttattttgactaaaacaaattgccacaggaagtttagatcaattagagttgaaatttccagaagaaatgtgggaacatcctcacatttgccccagcccctcagtcttccgaggacacctcagcatctaaactgcaaccccagagtaggtgctgctgttgtcctgtggccaagatggtaattgtgcatccttcaagtaagggagacacaacacacaaagtaatccatgcagaagggtgtttctgggcgggcacagtgactcccgtctgcaattccagtacaccgggagaccaaggcaggtggatcacctgaggtcacgagtttgagattagccatgccaacatggtgaaaccctgtctctactaaaaatacaaaaattgagctgggtgcagggctcatgcctgtaatcctagcactctgggaggccgaggctggtggatcacttgaggtcaggagtttgagaccagcctggccaacatcgtgaaactgcatctctactaaaaacataaaaagtagcctggcttggtgggcatctgtaatcccagctactcgggaggctgaggcaggagaattgcttgaactctggtggtggaggttgtagtgagccgagatcacaccactacactccagcctgggtgacagagtgagactcaaaaataaaatataataaaataaaaataaaaatacaaaaattaaccaggtgtggtggcacacccctataatcccagctacttgggaggctgaggcacaagaatcacttgaagctaggagacagagattgcagtgagccaagatcacaagagtgcactcatagtttggacaatagagtgagactctgtctaaaaaaagaaaaaaaaaggaaagaaagaaaaagtgcttctgatatgattgatgcagagataataaaacctgagtaacgtgatagagactggtgggcagagggaacttcagatgtgggtgggagggcatgggagacagctctgagcctagaactgaaggaggagaaagggacaatgcagtgatcatttagggacatagggtaagagcagggacaatgacctgagacagaaaaggttttggtgtttgggaaaaaaaaaatgtgactggggcagagggagtcatgagatgagggcaagctcccaggaggctggacactggcaggggccctggacacagggctgtggagccacagtgaggagttgggcttttgtcctggggaacacgggaagccggtggagggttccctgccaggcactgacatgacctgctttagatttggctgtgatgtcctcatacagagaaaggccccgaagatggtctctgtgtctgagtctaccgctctgtttcttccattcttctgcttttcttcatttttggggtactgcatcccatttaaaattctagttacaactgggcactcccctctcccagaagaaaagccacacccagacacccactctattttgccaatcatttcaggggccagggtcactcagggtgagcttttctggtctagcccctcatctccaagttgcagggacgctcactgggctcagagcggggacattttcaccgagttaccctgagaagatctgagatgagtgagaaggtgtgtctgaattcttacatgggggcctggaagggctaacgggaagggttggtctttatcacccctatccttgaaaattacagaagcatctttcaaatacctgggctaaagaaacttcctttacaaagttctgatgccactgattcctgacatttaattcttccttaaaaaaaaatcacagtcacattcataaaatgcagaagtgtgaacacacagtaattgaccttgaaaacagggaaagaaagtcagctgtagaactaagacgtaagcgaactgtttcaatcaagaatatatgggtggtcaggcacggtagctcttgcctgtaatcccagcacattgggaggtcgaggtgggcagatcacctgaggtcaggagctcgagaccagcctggcaaacatggtgaaaccttgtctctactaaaaatacaaaaaatgagccaggcatggtggcaggcaactgtaatcccagctactcaggaggctgaagcaggagaatcacttaaatcctggaggcaaatgtttctgcaagctgagatggcaccattgcacttccagcctggggaacaagagtgtaactgtcacaaa[132 bp omitted]cagctcaagattttaacaaatgacataaggaaagaaaactgaaaaatagactaactggttaaactgcattttgatgttaaggtaaaaggtcactgacatctttaccaggtacacactgaaacaatcaaacttctgtatgaggtaccaaagttttccaataaataataaaaactagaaagcatgcagacctcgatctgaactggatgcaactaatttcaaaccgaaactatttttaaattgttttaaaaaaaaatctaacaaactctgaggtcaacgggaacttaactggaacatatacatgtacagaaaggaatgatgtgagctggttataggatgccacaaagccatctttcagaagtgattaagtattaaaaaagatactcttaaaactaagatttttctcaaactccaactgcaaaaaaattacatatatatatatatatatatataaataaatgagaaaccagaaagaaaaaaaaaaagaaatctattacacaacaagaacaaaagcacttttgataccccttttattttttattttttgtttgtttgtttttctgagatggagactcgctatgccacccaggctgcagtgcagcaacatgatttcagctcactgcaacctctacctcccaggttcaagtgattgtgtacctcatcttcctgggcagctggaactacaggtgcacgccaccatgcctggctaagttttgtatttttcatagagacggcgtttcaccatgttggccaggctgctcttgaactcctgaccttacgtgattctctcacctcggtctcccaaagtgctgggattacaggcatgagataccacacctggctttgatgtccattttagaaagtactatgggctgggtgcagtggctcacatctgtaatcccagcactttgggagatcgaggtgagcagatcacctgaggtcaggagtttgagaccagcctctctaacatggagaaaccctgtctctactaaaaatacaaaattggcccagagtggtggcgcatgcctgtaatcccaactactcaggaggctaaggcaggagaattgcttgaacccagaaagcagaggttgcactaagctgagattgcaacattgccctccagcctgagcaacaagagtaaaactccatctcaaaaaaaaaaaaaaaagtactatgtaggccaggcgcagtgcctcaaccctgtaatcccagtactttgggaggtcaaagcaggaggatcctttgagcccaggattttgagaccagcttgggaatttaaaaccccgttttacaattatatatatagatatataatttatatagctatataaattataatataaattataatttatatatatataatttatatagctatataaattataatataaattataatttatatagctatataaattataatataaattataatttatatatctatataaattataatttatatagatatataaattatatataaattttatatataaattatatatataaattatatgtgtaaattttatatatatataaattttatatatatatatatataatgtatatatatataatgtgtatatatatatataatgtatatatatatatatatatatataatgtatatatatatataactagccgggcttggtggctcatgtctgaggtcccaactactcaggaggctgaggtaggaggatcacttgaccccagggggccaaggctgcagttagaggagatcacgccactgcactccagcccgagtgatacagccagaccctgtctcaaaatattaattaattaaattaaaagtattgtgtaataacagaaagtgatttttgttgcacttcactgccccacgtcctaccccaccctgggaaaagggaagagagtaacttccaactcaataagtcactgctctctggctgaatagggattccaactggaagctaacctctgatgccaagatttacagaatgtacatgtctcatagacaggaattttaaaattctcaatctcatctttataatttaatcaagttttaaattattagattatatacacagaagtcaacatgtcacaactaatcatagccaataaactcacctactcatctgatcccaaagtccccctgccccttcttttctttggtaacagggtctcactctgttgaccaggctgcagtgcagtggcatgatcttggctcactgcagcctggacctcccgagctcaagtgatcctcctcccttggcctccagagtagctgggattacaggtgcgcaccatcatacccgattaatttttttttttttttggcagagataaggatctcactatgttgtgcaggctggtctagaactcctggactcaagcaatccccctgcctcagtcttctaaagttctgggattacaggcatgaaccactgtacccagcctctctttcttcattactttgcttccttccctgattctgtacgtatctctcattctccccttctctctctagctcttgttttattttcccccggggttctgctcctcattttgtacctctctcctctcctgctgtttatccccttcttcactctattccttctcttccacctcttctgctccatccttgtaacttatctaacatcttgctgctcttctccccaatcttttgatcatcctctatctctatatggacagaaatttaaaaataataagtactgcatttattcactccaagaaaagtaaaagctaaggcccacaatgtggcaaggcaaggtttaaaaataaaaagaaaagaacaagttttcctctgcctgtcaagctcacatcaagaacggttacaggataacgctgtccgaatagccaagtctaaatgaatgggctccagacacccccaccttccagagcaaggttgaaggaaaaaaaaaaaaaaaaaaaaaagagagagattattttactgttactctttttccaggcttcttaagcattattatgttttacaaatgtctgtatttagtcagttcttgtttttcctttgatgcagctacaaggccaccggcaacccaaggtcacaagatatgttatgctatagattacacaacctgtcactgtataattaactgcttttgttttgcttttgtaaggccacttataaaaaccctgctctgtctttgttcagtgctcagctttttggatatgaatccactgagccagtgcgtacctaaaataaacaattctgtttctctcatattggtctctccattcttcagtttcccctaacacaaatatttccgcctcttctcccatctcagcgcctcctctgctctccctgttacattctctcttccctgttataccctcatccccactctctagcactccagatccccaggtgtcctccctgctgtgcttctccctctgttctccttgccaccagcaccactctgctctgtctgccctggctccaaatccctcctcctctccctcaccctgatgagcctccctctttgctgcccctctccctaccttgctgtccttcatgtctctgtacatccagcttttctctacatttctgcacttgcttttctcctcctgctttcttatcgttttcttttcacttttgctgtctcttggcaaatccctcacccatcctctactttgccatctcttatggctctttctcattcttcttttctctgtctcaggttttccactgctctctgtccgtctcctgatccctttggcccacacaatcacaggagggtttggagtaagacgcctgcatcccggaggagcttattttccaggggctggaactgggcaggcaagaacaccccgtgtcacaggacaggccccgggcacctccccaacgcgggctcaggagaagcggtgactgcggaggagagacctggggagcagcagggcccggcacgaggagggaggtggggggcgacggcgcctgaggacaagggtggggtctgcaggatcccaggactaggcagaggacacggcctccccgggacaggggccgcggcgctgcgcttcagaggccgacaagggcaaggctgggaggtgcccacggcgggaatccacttcgcgggtgaggacgttaaaaagcgcggggcgggaggagtctgaaaatgattttgagaaaaaaaaaaaaaaaacaacaacaactacgcgataggaagtgtatacattgccctagagcagaaagacaggggatgggaccaacctcagggcgactttagacccaaaaggaagcgacttccagactctcacggggatgtctctatttgctctgggtgaagacgggagagaagttccagatctgtggggaccctaggtccgagggacagaaacgctgaggacctgggaaatgcagacttaatacaaaacagcgaaactcaccgccgcggtgtgaccgtcactccacgcgatccgcttccagatttgcgagaatctgcgcgcgcaggacagaagccaggcctcggcgggccccgcgaggtggtgggcggggcctgggccgggtggcggcggggcgcgaagcagagagactttgcggtttagaaccggcagagggcggggccggggcgggacctgtgtgtctcacatcctggctcccagcgcctctgtttttcgggtttgggaggcgacagcggccaggaagtatgaggcatgattcaaaagccctggaattttctggaacggggatgcaaactagaatgtgaaatgcaaagccctgccagggcggaacataggatttcatgctgacggcccacagaacagaacagaactcctctccctttctattctccattcacaagggagggagggtccgccctgtgctcagcttcagagacttccctaaagccactgcctggggtgcgggacggagtgctcaggccagggaggagtgaggtcaccacctgctgcttaaacacagcaggggtgcaggcgcgaaggcgggagcctgaggtcccagctactcaggaagtaggagcaggaagatcgctgagccctggggtccaggccagcctgggcgacaaagtaacaccccctcccgcaaggccaccttccttgtctccctctctctccgtctctctctctctctctctctctcgctttttaaacctttttaaataaaatttttgatggtgtgacatagggatccaacattattctgttccgtgtggatatccagttagttgttccagcacatttgtggaagaaatctattacttttttttcacgtttttcttttctttttctttgagggagtctccctctgtcgcccaggctggcgtgaaggggcgtgatctctgctcactgcgacctctgcctcctgggttgaagcgattctcctgcctcagcctccggagtattacagtattactggtattagaggcacgagcgaccatgcccggctaatttttgtatttttgatagaggcgggctttcaccatgttggccaggctggtctcaaactccgaacttcaagtaatctacctgcctcggcctcctaaagtgctgggactacaggcgtgggctaccttgcatagcctaaggaatgctctttactgtttaaacgttgagaaaatataattgaaaacaaagaaaatcttcccccaaatgggtaattatctccacgacaacagagaaataaataaaaaccattttaataaagaaccttagactcaaatgtgatgggaaatagaggcaaacagctatgaggttgaaaagagagaaagaaatgtcactgttctatacaacccattaagcacatgttttcaagataaacactaatcagtcctcagggaaggggatttgacaaccccttgggtcacacatacttcatcctggctttacttggtaatggaggtgaccatctgtgtcagctaattagcttcatcccgagggagggggaaaaaccctaacccatgtctttttgacaagtgtgagtttcacaacatggggacaggtgccctctctggtgagactcctacaatacgacagacactgatgtcagaggtaaataataaaatttagaatatatgattaagtgcagagtttgtttgaacacaaagcttggaaatagccacctggaaacatcaacttcaaatgaataggatcagcgttctcaggtggagacgttaagattttacacacataggaaaagacagagaagctttaccagaatcacattttccattcaagaccagtgcctagggtgcagcaacttgactggtgatggattgatacacttcaaggaaggttactttatcactccataagaagggacaatgatgccaaaaggtcttaactctggggctgcttagtcttcctaattatttacagaataacctttttttttttagttgtttgtttgttgttgctgtcattttttcagacagcgtctagctctgtcacccaggctggagtgtactggcactatctcggctcactgcaacctccacctcccgggttcaagcagttctcctgccccagtcagccaggtagctgcgattacaggccagtgcgaccacgcctggctaattgttttctgtttttagtagatactgggtttcaccatgttgggcttctccattaatctctcctgcacacttcagaccacatccacacacacttaaatcaacttcagttcagagatgagaagcaaaaacctagagaggacacatccacagttactcaccaggctgaggtgggaggattgcttgaccctggagagcagaggttgaagtgactcaagatcgcaccactgccctccagcctgggggacatagtgagaccccgttacccacatccaccaaaaagttggaaatgcattgaaataagagacagcttcaagaaactataaaagcaatgcatgcagaaaattcaaaggtcaaccaacatacagaaactatgaagaactacacagaaactcttgggctaaaaatagagtaactaaatgaaaaaacgcaatacatgggttcaaaatcagaattcattaggtaaattaaaaattagtgaagaggggatgggtgaggtggctcacaccaggactttgggaggacaaggtgggtggatcacttgagctcaggagtttggagaccaacctggccaatgtggtgaaaccttgtctctactaaaaatacaaagattaacagggtgtggtggtgagctcctgtagtcccagctactctaggggctgatacaggagaagcacttgaacatgggaggcagaggttgcagtgagccgagatcaccccactgccctccagcctgggcgacaaagcaggactgtctcaaaaaataataataataataataataaaataggccaggcctggtggcttatgcttgtaatcccactataaaaaaaaaatacagaaaattagccaggcgtggtggtgggcacctgcagtctcagctactcgggaggctgaggcagaagaatggcatgaacctgggaggtggagcttgcggtgagctgagatcatgccactgcactccagcctgggcgacagagcaagactccatctcaaaaaaaaaaaaaaaaagaaatttatccttactacttactgtctacacatagataatcaaaggcaagtagttaaagacatagttaaaaatatgacaaaactggccgggcatggtggctcaagcctgtaatcccagcactttgggagaccgaggtgggtggatcacaaggtcaggagatcgagaccatcctggctaacacggtgaatccccgtctctactaaaaatacaacaaattagcagggtgtggtggcgggcgcctgtagtcccagctactccggaggctgaggcagaagaatggcgtgaacccgggaggcggagcttgcagtgagccgagatcaacccactgtactccagcctgggcgacagagcaagacttcgtctcaaaaaaaaaaaaaaaaaaaaaagacaaaactgacacatgtgcccatacaagtgtagcatggattcaaccctgatgccatgtttagaaagtagttcccagcactaggaggatttaaaactcttataataggagttattatagtaatagaaacctgcttactgctgccttgtttgctacctgtacttcttcaaacgataaaaagcttcatcgctattttagttcaccaaaatgcttcagcacaagtgtactatatgaatcactatcaatctgttgcacaaaaagacataagcagcaaaaataagagtgagaattcccactaataaaaagtgagactctcaaaggggggaaatgagggaagagagagagaccctctcatattgttttatattgttttatactcagtacctgttttaagaaaaaaacaaggaagtgaaaccaaaggcaggcatcccgatgccaggcatcagacctaaaaccagacctgaaaccaggcctcggcctgcctggcctaaacctagtaattaaaattccacccctgacctagcaactgatgttatctatagatcccagacattgtatggaaggacattgtgaaacctcctgttctgttctgtttcactctgaccaccagcgcatgcaccccctgtcacataccccctgcttgctcaaatcaatcactaccctttaatgtgaaatctttagtgttgtgagcccttaaaagggacagaaattgttcactcagagagctcggattttaagacagtagcttgccaatgctcccagctgaataaagcccttccttctacaactcggtgtctgagaagttttgtctgtggctcatcctgctacaacctgagggcaggagttcaagactagctgggccaaaatggtgaaaccccatctctactaaaaatacaaaaaaaattagttgggggtggtggcactggactataatccccaactttttgggaggctaaaacaggagaattgcctgggaggcagagtttgcagtgatctgagatcatgccactgaactccagcctggataacagagactttgtctcaaaaaaaaaaaaaaaaggccagaagaggtggctcacgcctgtaatcccagcactttaaaacgctgaggcggacggatcacgaggttatgaaatccagactgtcatgactaacaaggtgaaataccatctctactgaaaataccaaaaaattatccgggcgtggtggcactcacgtgtagtcccacatacttgggagcctgaggtaggagaatcacttgaacccaggaggcagagtttgcagtgagccgagatcacgccacagcactccagcctggctaccgggtgagactccatctcaaaaaaaaaaaaaaaaaaaaattaaccggccatggtggaactcacctgtggtcccagctacttgggaggctgaggttgggaaatggcttgagcctgaaggaggttgcagtgagctaagatcacgccattgctctccagcctaagcgacacagcaagaccttctctcaaaataaaatcaaatatatgaaaacagaataactcaaagtacaaaaatccattttgttgatataggtccacaaaataataaaacagagactcgcaagaaactacatgctaataaaaaaaagttgtcattttccccagatcttttctttcttcctttttttttttttttttttttttttagacagggtctcgttctgtcgcccaggctgcagtgcagtaatgcaatcttggttcactgcaacctctgccttctgggttcaagtggttctcctgcctcagccacagagtagctgggattaccggtgcccaccaccatgcccggctaacttctgtatttttagtaaagatggggtttcaccatgttggccaggcttgtcttgaactcctgagctcaggtgacccaccaacctcagcttcccaaagtgctaggattacagacatgagtcaccacatccagcaaattttcaaaatatatacatatatgtgtgccaatgtgtacgtatatgtatgtgtgtgtgtgtgtgtatatatatatataaagatttttaaaatataaaaagtagcaagttttgtttaactgaagaggaatctcatcttgctggaaacggatactttgatagttggggacagggaggaatcttgtcagatctaagaaaacaggaaatgtcccctcctagaggaagcaatcaccctttcaactgcctgacatggaggaatctttagatatctgtaggaatgcaggcatgctcagatgcagccactatggcactctttatacagagaaaaattgcaaaggacccacatactgtcattcagccaatttccaatgcagatgtcaaagagcaagctagccatgtttactaacataacaacatgtaaattttcacaactagcaggatgaaatatcaaagtaaaatatttactaaaacacaaagaaaacaatagacgctggggtctaggtgagggtggagatggggaggagagaggagcagaaaaaatagctaatggggctgggcacagtggctcacgcctgtaatcccagcactttgctagggcaagggggttggatcacctgaggtcaggagttcaagatcagcctggccaacatggtgaaaccctgtctctactaaaagtacaaacattagccaggcatggaggcatgtgcttgtaatcccagctactcaggaggctgaggcaggagagttgcttgaacccaggaggcagaggttgcagtgagccgagatcatgccatcatactccagactcaaaaaacgagcaaaactcagtgtcaaaaaaaaaagaaaagaaaaaaagctactgggtactgggcttgataccggtgtacaacaaactccaatgacatgagtttgcctatgtaacaaaccatcacatgtagccccaatcctaaagtaaaaacataactataaaacattttatttttttaatttactacggaattatttttaaagtctcataatgatgcagaaatacaggtgtacaagacttgctctgacacttggcacagaactgacagtagcggctccccagtgagtttggaaagagggtggaggacgtgacagggaaaggagatgctttgtggcaaagggtctgcagctttgctaagagttttactagaaaacaaatatatccatcctgtgatgtttaaatatcaaaatatatatttaataaacattggtagagctgagcacggtggctcgtgcctgtaatcccagcactctgggaggctgaggtgggtggataacctgaggtcagaactttgaggccaccctggccaacatggtgaaaccccatctctactaaaaatacaaaaaaattagccgggcgtggtggcacacgcctataaccccagctacttgggaggctgaggcaggagaatcacttgaacccagaagacagaggttgcagtaaactgagatcatgtcactgcactccagcttgggtggcagaggctgactccatctcaaaaaataaattgtaaccatttttaccaaaaacacctgtttcacaagcctctccacagtaaccccacagtctccatgagcttaatgtgttaagaatggtttaatgaatctcctgctattatttaggttgatttcctattcttaaactaatgatggaataaaacaccttctatcattcatgtctgtgtatgaactttccactctaattagttcgatttttggagccagaaacacaataactcactcaattacctaaaaatgtagtatgaaagtgaagcggtgggttgcccctccacacctgtgggtgtttctcgttaggtggaatgagagacttggaaaagaaaaagacacagagacaaagtgtagagaaagaaataagggggcccaggggaccagggttcagcatatggaggatcccgccagcctctgagttcccttcatatttattgatcattttggggtgtttctcagagagggggatgtggcagggtcataggataatagtggagagaaggtcagcagataaacacgtgaacaaaggtctctgcatcatagacaaggtaaaaaatcaagtgctgtgctttagatatgcatacacataaacatctcaatgccttacagagcagtattgctgcccgcatgtcccacctccagccctaaggtggttttcccctatctcagtagatggaacatacaatcgggttttataccgagacattccattgcccagggacgggcaggagacggatgccttcctcttgtctcaattgcaagaggcgtgccttcctcttatactaatcctcctcagcacagaccctttacgggtgtcgggctgggagacggtcaggtctttcccttcccatgaggccatatttcagactatcacatggggagaaaccttggacaatacctggctttcctaggcagaggtccctgcggccttccgcagtgtttgtgtctctgggtacttaagattagggagtggtgatgactcttaaggagcatgctgccttcaagcgtctgtttaacaaagcacatcttgcaccgcccttaatccatttaaccctgagtggacacagcacatgtttcagagagcatggggttgggggtaaggtcatagattaacagcatctcaaggcagaagaatttgtcttagtacagaacaaaatggagtctcctatgtctacttctttctacacagacacagtaacaatctgatctctctttcttttccccacatgaaagcaggcagaaaagattttcacttattggtttccttttctagaatttaccacgtactttgtgcacattaatacgtgacttccattggcagctgctctaatcctgctccacagagagctgacagtgcatccatatgtggcccctgaacaatcccttctgcccaacagcactgacaccacgggaccctcaccccgtctccatccatgtctgggtgtgagcccttcccaggcccatgcccagtgcagcctctttccaacttcatgtcactaggtcaccagagatggaatctaagcgagatgagagggactgagggaaggcatgggtgagtgtgagtaaacgtatcaggcaggaagcttcagactcagagaagattcccaactccaaggcccagggtttctgaaaggaaggagacagaacaatccaccgagaatatcatctcacctgaggaagagccatccctgactcctttgctttcctcttcctcttccgggtttcttcctcatgtaccaagagtctttaggagtcaatcctgaatgttaaaaatatgttgtttgttgctcagaatcaacacaccccctccctggaacacaaccacacatgcgaagtgtcacgcacgtctgtgggaagaggccaccaaacacgctttgtgtgagcaacgaggctgtttatttcacctgggtgcagccgggctgagtctggaaagagagtcagcaaagtgtggtgggattatcattagttctcataggttttgggacaggcggtggagttaggggcaatgctttgcaggcagggggtggatctcaccaagtccattctcaagggtggggaggattacaaagagccttctgaagggtgggggagattacaaagcacattgatcagtcagggtagggcagaaacaaatcacaatattggaatgtcatcagttaaggatatttttacagttgcttcaggctatctggatgtatacgtgcaggtcacaggggatatgatggcttagcttgggctcagaggcctaactaaagacctcaccctgaggaaatagtgccccctgctgccctcctcaccatggatgataaactcctacagggaaactcccgctccccttctggaggagtccacacacaagctgcagcagtggggagctgggctggaatgagctccccttcagggcacagacccagccctgacgaaaccccacgcagaggctgggtgcggtggctcatgcctgtcatcccagcactctaggaggctgtggcaggtagatcgcttgaactcaggagtttgagaacagcctgagcaacatggtgaaaccccatctctaccaaaaatacaaaacttcgccaggtatggtggtgcacgtctgtgtgtctgtggtcccagctacttaggaggcataggtgggaggatcacttgacctgaggagtttgagagcagcctggccaacatggtgaaaccctgtatctactaaaaatacaaaaatgggccgggcgtgtgggtcatccggtaatcctagcactctggaaggccgaggtgtgctgattacttgaggtcaggagatcgagaccagcctggccaacatggtgaaacgctgtctctactaaatacacaaaaagtagccgggcttggtaagtgtctgtaatctctgctattcaggagactgaggtaggagaattgcttgaacccgggaggtggaggtcgcagtgagccgagatggcgccactacactccagtcttggtgacagacagactcaaaaataatataaaatggaagttaaaatacaaaaattagccgggtgtggtggcagacacaccagctacttgggaggctgaggcaccagaattgcttgaacccagcagacagaggttgcagtgagccaagatcaagaggctgcactcataggctgaaagatagagtgactctgtctcaaaaaaaaaaaaaaaaaaaaaatgcatttctgatgtgattgatgcagacaatgaatcctgagtaacgtgatacagactgatggacaagggaactacagccgggggtgggagggcatgggcgacagctctgagcctagacctgaaggaggagaaagtgacagggtacgtagggtaaaaccagggacaacgacctgagacaggaagggttttgatgtttgggaaaagagaaaagcaaatatgactggggcggagagagtcatgagatgagggcaagctcccaggaggaggctggacagtggaaggggccctggacacagggctgtggagccacagtgaggggttgggcttttgtcctggggaacacgggaagctggtggagggttccctgtcagggactgacatgacctgctttagattttgttgtgatgtcctcatacagagaaaggccccgaagatggtctctgtgtctgagtctacctctgtttcttccattcttctgcttttgtttttcatttttagggcactgcatcccattgaaaattctaatcacaactgggcactcctctcctcaaaaaaatttaaaaaaaaagccacacccacacacgcactccattttgtcaatcatttcaggggtcaaagtcactagggttgagcttttctggtgtagcccctcatcgccaagttccaaggaggctcactggggctcagattggaagacattttcaccaagttgccctgagaaggtctgagatgagtgaggtgtgcctgaattcttacatgggggcctgcagggactaatgggaagggttgatcttatcacccccatcctggaaaattagagaaggctctttcacaaacctgggctaaagaaatttcttttgccgggcacggtggctcaagcctgtaatcccagcactttgggaggctgaggcgggtggatcacctgaggtcaggagtttgaggccagcctgaccaacacggagaaaccccgtctctataaaaatacaaaattagctaggagtggtagtgcatgcctctaatcccaggtacttgggaggctaaggaaggagaatcacttgaacccgggagacggaggttgcagtgagccgagatcgtgccactgcactcaagcctgggggacaagagcgaaactccgtctccaaaaaaaaaaaagaaaagaaaaaaaagaaacaaacttcttttgcaaggttctgaggccattgactcctgacagtttgttcttccttacaagaaaatcacagtaacatttataaaatgcagagttgtgaacacatagctattgaccttggaaacagggaaagaaggtcaggtgtacaactaagacataagcaaattgtttcaatcaagaatacatgagtggtcaggcacggtggctcacgcctgtaatcccagcactttgggaggtcgaggtgggcagatcaccagaagtcagtagtttgagaccagcctggccaacacagtgagagcctgtctctactgacaatgcaaaaacctagccaggagtggtggagggcacctgtaatcccaactacttggtaggctgaggcaggagaatcacttgaacccaggaggcagacgttgtagtgacaccagatcgcaccattgcagtccagcctgggcaacaagagcaaaactccatctcaaaaaaaaacccccaaaaaaacaaaaagaaaaacaaaaaaaaaaccgaggctgggagcagtggctcacacctgtaatctcatcacattgggaggccaagtcgggtggatcacaaggtcaggatttgagaccagcctgacaaacgtgatgaaaccccgtctctactaaaaatacaaaaattagccaggcatgctggtgggtgcctgtaattccagctactcaggagactgaggcaggagcatcacttgatcccaggaggcagaggttgcagtgagctgagattgcaccactgccctccatccaaggcgacagagcaagattccatttcaaaaaagaaaagaaaagaatacacgggtgcttttggaggagcgttctatgccaatccagcccatgtttcaacatttttccagaatggaccagagggccttgagggaaacacgcaataaatagctcccagatcaagattttaacaaaggacataaggaaagaaaactgaaaaacagactaactggttaaagtacattttgatgtttagttaaaaggccactgacatatttaccaagtacacactgaaacaatcaaacttaagtttaggtaccaaaggttttcaataaataacaaagactagaaagcatgcagacattgatatgaactggatgcaactaatttaaaacagcaactattttgaaattgttttttaaaaaaatctaacgaattctggggtcaaccggaaaataactggaaaatatacaagtacagaaacgaatgatgtgagctgattataggatgctgcaaaggcatctttcagaagtcattatgtattaagaaatacaacttttataacttagatttatctcaaactcaaactgcaaaataaataaataaataaataaaaaataaagagagaaatgaagaggaaccagaaagaaaaagaaggaagtccattatacgagaagaaaagcatttttgaggtctttttttgttattttttgtttgtttgagatggagactcactctgccacccaggctgcagtatagtggcacaattttggttcactgcaacttctacctcctaggtttaagcaattctcatgccccagcctcccaagtagctggaactaaaggtgcacaccaacacccccggctaacttttgtatttttagtagagatggggtttcaccatgttagggtgcttttgaaattgtgaccttaggtgaccagttcacatgggtcgaccaaagtactctgattgcagggatgagccaccacgtaccgaggctttgatatccttttttttttttttttttttgagatagactctcactctgtcgcccaggctggagcccagtggtgcgatctcgactccctgcaagctccgcctcacaggttcatgccattctcctgcctcagcatctggagtagctgggactacaggcgccagccaccatgcccagctaattttttgtatttttagtagagacagggattcaccctgttagccaggaaagtctcgatctcctgaccccgtgatctgcctgcctcggcctcccaaagtgctgggattataggcatgagcctccgtgcctggcctcatatcccttttaaaaattactatgatatatccctttcaaaaagtactaactgaaaaaagtactatctctttaaaaagtactggctcaaaaaaataatagaaaataagaaacaaaaaacaggctgagaaaagtggctcacatctgttggccatgctggtttcaaactcctgacctcaagtgacctatgtgccttggcctcccgacgtgctgggattacaggtcggagccaccacacctggccccatcctcttaacataaacacttgaatgtcaataaaggcttgaactcaatgttaagtcaacacaaactcaagtcaatgctgaattgactccaatgtcaattaatgcttgatggtttgctatactcatttcattgggaacggttatctcaaaaatgaattttctgatgttctgcatggagtgatcttggactgaagaccttgccacactgatgacatttgtaagatttctgtccagtatagattctctgatgtctaatgacgtgtgaacgtgaagcaaaggctttgccacaatcatcacacttgtgaggtttctctcctgtataaattctcctatgttttgcataggatgaagcttgactgaagaccttggcacagtcatgacatttgtaaggtttctctccagtatgagttcaccgatgacctgcaatatgtgaacgatctctgaaaaatttgccacatttattacacttgtaagatctctcttcattatggattctccaatgatttgtaatcgttgtagcattactgaagactttgtgacaatcattacattagtcaagtttccctacaccatgaattgcctgatggtgaataagtgttgactgcttgccaaaggctttgccacactcattacacttgtaaggtttctctccagtgtgaagtccagtatgttgttccaggtgtgaatcactcccaagtcttgtcagaaaccttacatttgtaagctttctctccagtataaattctcctatgtctttaaggtgtgatttccaaatggaaactttgtcacatgcttcacatttctaaggtttctctccagtatgaattctatgatgacgtgaaaggtgtgattgttgattaaaagccttcccacattcattacacttgtaaggtttctctgcagtgtgaattctggtatgtcttgacaggagtgaattacgcacgaaagccttgtcacaaattgtacatttgtaagatttctctccagtatgaagtctacgatggtatataagggatgagcagtgacggaaggtattgccacactcattacacttgtaaggtttctcaccactatgaagtctacgatggcaatgaagggatgacctgcgactgaaggtcttgctgcactcattacacttgtaaggtttctcaccactatgaactctatgatggcatacaaggtatgacctgtgactgaaggtcttgctgcactcattacacttgtaaggtttctctccactatgaattctagtatgttttgccagataggaatgacacgcaaaagccttgtcacaaaccttacatttgtatggtttctctccagtatgacctatcttatgtgtctcaaggcttgatttacgactgaaaaccttttcacattcatcacatttgtaaggttgctccccagtatgaattgacttatgaattaaaagatctgaattttgaccaaaggtcttcccacattcattacacttgtaaggtttttctccacagtcaattctagtatgttttgccagttgtgaactccacacaaaagccttgtcacaaaccttacatttgtaagatttctctccaccatgaagtctatgatggcatacaagggatgacttgtgactgaaggtcttgccacactcattacatttataagttttctttgcagtatgaattcttctatgtcgagccagctgtgaatgccacgtgaaagctgtgtcacaaaccttacatctgtatggtttctctccagtatgaattctcttatgtgtctcaatggttgatttccgactgaaaactttgtcacattcttcacatttgtaaggtttctctccagtatgaattctatgatgtgaaagttgtgattgttgattaaaagccttgtcacattcattacacttgtaaggattttctccagtatcaattgccttatcaattagaagggctgaattttgaccaaagatcttgccacactcattacaattgtaacgttttactccagtatgaagtctacgatggcaggtaagggatgactcctgactgaaggtcttgccacactctttacacttgtaaggtttctcaacagtgtgacatctatcatggcatgcaaggtattgctcgtgattaaagagcttgccacatacatcacatttatattgtttgtctcctaaatggggtatctggtgtttccttaagagtgagctacaattaaaggctttgccactcttattacattggaaagatttttctctcatgtgtacttcctgtttttgtgggagtaatgaagaattcaggggattattcccatagttattagaaatctgggtttggggcctacaggaaattctttggaatgttgaaactgagggagcatcattagtagacttctcaagttgattaccaatttcacctttgatctgaaatatgtggagttcaggcagatgtgaataaaagcttgatccaagctgatctttaataggcttgtttccagcatgcctgtgatcatgttggtctgtgctaccagtcaacttttttatttttgtcatgggtgcttcaaggccatttctttcatcttcttgacactgaaactcaatgtcatgaatttctttctcaatttcctggaagcaaaaatctccaatgtgatgactttcatgtctttgcaatgtccctgtgtggatcacttctgtattgccttgccctgttgacaagacctccttcatcatgcatttggaagagatatctacaaaatataaacaccaatacatttccaattaagtacagatggtaaatcacactgaagtgcataaatatgacacaaaaaacgatacttattttgaacttcccaaacatcatcttcaaagtttaggaaaacgaaaggagcaatattctttagtaaataaagggtgattacatgtccttcaagacaattctatgaaagcctatttcctatgtcatgacaaaacactgacagggcacaaacatgtgtaagcctaaagtaaggagtatttttccactgtgaccctgaactgtatcacaatttgcaaaaagcatatcaccatcacatcggtgaagagaaaaatatatactcttcatatttaaagcatatttactctatacaaataaatgctaaaaaaaaaaaaaaaactccccacacaacatactatattggtaaataatccacaacaagctcatgtaaggataaccaaaagcaatggaaattccgtattgtcaaacaattatagcactgagaagataagaaaagattacaaaaattagccaggtatggtggcccatgcctgtagtcacagctattcaggaggctgaagcacaagaatcacttaaacctgggaggtagaggttgcagtgagccaggatcacaccactgcactccagcctgggtgacaaagtgagactctacctaaaaaaaaaaaaaaaaagttaatagaatatttttctgaataaatgtcataaaattacctataagaacaggcactttgtgacttttcaaaaattttttgtatttttatttttttgagatggagtcttgcactccagcttggagtgccatggtgccatctcagctcactgcagcctctgcctcctgggttgaagtgattctcctgcctcagcttccagagtagcttggactacaggcatgcaccactatgcctggctaatttttgtgtttttagtaaagatggggaccatattggccaggctggtctcaaactcctgacctcaagtaatccacccacctcggcctcccaaagttctgggattacaggtgtgagccactgcacctggtggcactttgtgacattaacgaatagtgcatgtcagttatattgcataccacataccgaaaagccatatgcaaaattataaaaattaattaataaaatattgtaacccaagataaaaccagcaagcaaataagtacatttatacagcctgcagaattctaaacaactccctcttaagaaaaaagccacaacttctactcaaccaccagcacacaatataagaactgaaatacatgttaagatcactaccttctgatgtatgaggccaagaaaatacacagcattaggccaggcgccttggctcaagcctgtaatcccaccactttgggaggccgagtcagacggatcacgaggtcaggagattgagaccatcctggctaacacagtgaaaccccgtctctactaaaaaaatacaaaaacattagctgggcatgatggctggtgcctgtagtccaagctactctggaagctgaggcaggagaatggcatgaacctggaagatggagactgcagtgagcccagatcgcgccactgcactctagcctgggtgacagagcgagactctgtctcaaaaatgaaataaaataaagaaaatacacagcatcttaagaaataagaattggctaatggctgggcacggtggctcacacgtgtaatcccagtactttggcaggccaaggcatgtggatcatgaggtcaggagttcaagaacagcctgaccaacatggggaaaccccatcctacgaagaatacaaaaaaatcagctgggcctggtggagggcgcctataatctcagctactttggaggctgaggcaaaagaatcatttgaactcaggaggtggagggtgcagtgagctgagatcgcaccattgcactccagcctgggtgacagggcaagactccgtctcaaaaaaaaataaacaaaggaagaaagaattgactaatagtatagaaaagtgtaattatgatgtcacaactacacttatgtaacagccaggcaatacagcaattttatatatatgcattccccatagttatctagttcactatgcataaaatataaaacatagaatgtgtactaggaaaatttattaactgagatcagagaaaacattgtataaaacaaattgcacaataagaacaaaaaatatgatgtatgttccctggcccgaatgttcgcattggctaaaagccactatcagatttcttattccccaataggatgttcctgcagttggggtcttttagagagttttgtaatgggtgttgactaattatgaatagcactagggcttttaattgtattttttctttctttttttctttctctctttactatttatttttatttatttattttttgagagggagtatcactgtgtagcccagcctggagtgcggtggtgcaatcttggctcactgcaacctctgcctcccgggttcaagcgattctcctgcctcagccttcagagtagctaggactacaggcatgcaccaccatgcccagataatttttatatttttagtagagaaggggtttcaccatgttggccaggatggtctcaatcttttgacctcatgatccgccctcctcgcctcccaaagtgctgggattacaggcgtgagccaccatgcccggactctttatttatttttgagacagaatttcgctcttgttgcccaggctggagtgcaatagcgtgatctaggatcaccacaaccaccgcctcgcaggttcaagcgattctcctgcctcagccacccgagtagctgggattacaggcatgtgccaccactcccggctaattttgtagttttagtagagatgtggtttctccatgttggtcaggctggtctcaaactcccggcctcatgtgatttggctgtctcagcctcccaaagtgctgggattgcaggcgtgagccaccatgcccggcaaagactagtgcttttataaaaagagacagtaaagagctcattgcctgctcctctttacaccacatcaggacacggcaggaagacggctgggctaaaccatgaagaaggctctcaccaggagccaatctagctgacatcttgttcttggatttcccactttccagattcatgagcaacaaatttctatgtcttaagctttccagtttcagctatttctttttttgtctgtttttgagactgagtaatgcttcatcacccaggctggagtgcagtggcacgattctcctacctaaagagattctcatgcctcagcctcttgagtagcagggagtacagacacatgccaccatgcctggctaattttttttttttttttttttgggaaacagaatctaactctgtcacccgggatggagtaagtggtgcaatcatggctcactgcaacatccaactccaaggttcaagtgattctcatgtctcagcctcacgagaagctgggattacaggttcataccaacacacccagctaacttttgtatttttactagagatggggtttcaccatgttggccaggctggtctagaacttctgacctcaagtgatccacccgtctcggcctcccaaaatattgggataataggtgtgagacatcatgcccgtccaatgttttttaatttagtaggttcaagttttcattatgtttgcccgactggtctcaaactcctgacctcaagccatctacccacctcagcctttcaaagtgctggaattagaggccaaagccactgcggctggccagtctaagctatttctaacaggacagtgaaaagagtgagacaggaaagggggcatctcatcatcaacattactgagggctgacaaatattattaaacaaaggaagttgagtgtgtactataaaacttatatgaagccatctaatagtactcatttgttttaaaaagcaggtggatgaatcactagtagaaactccatctctgctaaaaatacagaaattagccaggctcgcaccaggcataatcccagctacttgggggattatgtcctgaggcaggacaatcacttgaacccaagaagtggaggttgcagtgagccgagactgcaccactgcagtccagcctgggcaacaagagggaaactccatttaaaaaaaaaaaaaaaaaggccaggcacagtggctcatgcctgtaatcccagtactttcggaggctgaggcaggtagatcacttgaggtcaggagttcgagaccagcctggccaacatggtgaaacccccatctctactaaaaatacaaaacttgccaggcgtggtggcacttgcctgtaatcccagcttctcgggaggctgaggcaggagaaccatttgaatccgggaggtggaggttgcggtgaactcagattgtgccattgcacttcagcctgggaaacaggagcaaaactctttctcaaacaaaacaaaactaaacaaaaaacaaaaaaaaaaaccaaccctggaggcaaattaacattatttctcaaataatgacagcaggcccacagtgttcatgtacatgaccccagtttgcacgtacggtaagtgagggacaagacttgatcctgggcatgaaggatcccacgacatgttcttaggcacaatagtcagcgcaggcaggacaggaaatgaccagacacagaaaatatgaggagaacagaaagaagtacatcaagggggatacaaggactgagctgggacacaagcgctgagctgcgctgctgacagtggttctgaagccatccctcatggatcatgtgctgagtcatgatgtcctgcacacactgatttaagcggcctcctataattttgtccagtggatgaacaaggtcttcacttactcagggagagtagtgttggaggggaggggctcacggggaaattggggtgttcacttttacaaagtcaataggctggtatttgcatccagatcaatgtatcatgtgagtcaaggccaggaaaggaagggcaagggtggacggcaggaagtaatgggcatgtaggagtgaactttgtgcatgcacctctgtgggaatataattccaccaagatagaccaaatcttgagcttagaggaaagtggaactaatttagcaaatggtaacatattgacccaaggttaaatatgcaaattacaatatgggcaagggacaagaatgaaagagatccaacaatgcagcagtacggtggcctgaggtgaaagcagttttacatctcttaaattgaatgcctctgacttctagtttcaggcatgtactcaacaaaatcctctgtgtagattccagaaatgcatacaaacacacacacaaaaaaacaactaaactccatgaagagtacagtagagcaatgtaggagaccatgggggtgaacaaggatcccctggctgagtaggtagagatgtgtttgtgaaaacagagccaggctgagtgcagtggcttacttctgtaatcccagctcattaggaagacgggtgggtggatcatgttgtcaggagttcaagactagcctggccagcatgcatggtgaaacactgtctctactaaaaaaaaaaaaaaaaaaaaaaaaaaaaaaacattggccgggcatggtgatgcacatctatgaccccagctacttaggaggctgaggtagcagattgcttgaacccaggaggcagaggttgcagtaagctgagattgcaccactgcactccagcatgggtgacagagcaatactccgtctgaaaaaaaaaaaaagaaagaaactgtacctttaatagacatatggttttgccacattgtctaggctggtctcgaattcctgacctcaggtgattcacccacgcacttccaaagtgctgggattactggcatgtgcgacttcacccagctgacattatttattatagtaaagagaagaaaccaacccagatgtccattgacagataaatatacgaacaaaatgtggtacacacatacagtggaatattattcagccttaaaaacaaactcggaaggggccaggggctgtggctcatgcctgtaatcccagcactttgggaatccaaggcaactgaatcacgtcaggccaggctatcaaaatcagcctggccaacatggcaaaactgccatctgtaatagaactaccaaaaattagtcgggtgtggtgacacatgcctgtaatcccagccactcaagaggctgaggcaggagagtcgcttgaacccaaaaggaggaggttgcagtgagccaagatcatgccactgcactcaagcctgggcaacagagtgagactctgactcaaaacaaacaaacaaaaaaacaacaacatagaaatgaacaagttgaaagccactgtgtcttaaggaaatgacagtagaactaaacaatggaaacctcattcaacctcaaaagcttcctcaataagattgatgaaaaccatatctcttacagggttgatcctacaacaaactgaacataggttttcttgttaaaaatgaacagtgacacatattggtgtgaaaaatgtgacatgaacaagagttcagtcaagagcctcatacatatgaggctgtgagcccgaatgatgtcctcgctgggaggaattgcaacaccactgactgctgcttagagaagatgatcattagtttatgggatgaacattgtcacagtgccagtgagagacgcttctgtgatgctcctcaaaaaccagaatgagctgggcatggtggctcacgcctgtaatcccagcactttgggaggccgaggtgggtggatcacctgaggtcgggagttagagacgagcctgaccaacatggagaaaccccatctctactaaaaatacaaaattagctgggtgtggtctcgcatgcctataataacagctactcaggaggctgaggcaggagaatcacttgatcctgaggggcggaggttatggtgagccaagatcataccattgcactccagcctcggcaataggagcgaaacaccatctcaaaaacaaaaaacaaaaaacaaaacccatgtatggggcaaaatcacaaaagaggatacaaagccaggatgagccaagatagacaagagcagactcctcatgtctgcagggacattttcctcacccacagcctccaggttcctgtagttctccaacatcacttccctgtacaaagccctctgtgaagggttcaggcatttccactctgccaatgagaattctatagccacatcccggaaagtcaagcgtccctaaaatgaaacacacatttcaacaaaacattatggagtaatgagttatcaccttcacagaaaatgagaaatgagaaaataagtatttatttgatcaaagattatgttctgacaaaaggatgttaaggtatttttgaatattttttccctatagttgcgttttattgtagttttccttgaaagattttaagatcccataagtcactacggaaatctcgattttatggacaatataaaaactataaaaataaaaaggaaaaacagggccaggcatggcagttcacgcttgtaatcccaacacttcaggaggccaaggcgggcagattatttgcggtcaagagttcgagaccagcctggccaatgtggtgaaaaactgtctctcctaaaaatataaaaattagccgggcatggtagaaggcacctgtaatcccagctacacaggaggctgaggcaggagaatcacttgaacccgggagatggaggctgcagtgagccaagttcgcaccactgccctccatcctgggcaacagactgacactccatctcaaaaaacaaaacaaaacaaaacaaaaaaacaatgccgggcagtgactgtcacctgtaatcccagcactttgggagaccaagacgggcagataatgtggtcaagagattgagaccatcctggtcaacatggcaaaaccatgtctctactaaaaatacaaatattagctgggtgttgtggtgcaggcctgtactcccagatactcaagaggctgaggcaggaggatcgcttgaatccgggaggcggaggttgcagtgagccaagatcgcaccactgcactttagcctggcaacagagcaagactccatctcacacacacaaaaacaaaacaaaacaaaacaaaaaaacaaatacagggttttctctatagacatgccagatattatgttcaacataccgggtgatattaagtctctagatgagctaagatacatgtggtgcttcagagaggacaaagtccaatggctttcaaagaaaagtccaaatctaaaaactggcacagtggctcatgcctgtaatcccagcactttgggaggctgaggtgggcggatcacaaggtcaggagttcgagaccagcctgggaacatgctgaaaccccttctctactaaaagtacaaaaattagctgggcgtggtggtaggtgcctgtaatccccaatactggggaggctgaggctggagaattgcttgaaaccaggaggcagaggttgcagtgagctgataccatgccggatacaaaatctctctccttattattctccttttccagaattaaccacacatctgtgcacattaacatatgtatttcatatgtagtttctctgagctgacatccagatgtggcccgtgaacaacccaggctgcccagcagcactgacatcaacgggctcacaccccatgtttatccatgtcagggtgtgagcccttcccaggaccatgcccagtggagcctcttcccaagttcatgtcactgggtcacaggagatggaatctcagagcagctgagaggaactgagggcaggcatgggtgagtgcgagtgaacgtgtcagacaagatgcttcagactcagaaaagactggctgctacaatacctggcatttcagaaacgaaagacacagattaatccacagaggaatatcacttcacctgaggaagagccatgcctggctcctttcctttcctcttctgagctgcttcctcacgtaacatgagtctttaggaatcaatcctgtatgtgaaaaaaaatgagacttcatgttagaaatgactcactcccttcctgtgacaaaaacacacgaacgggggagacgtcaccctgtagaaagaagtcccccactgcccactgcaccagagatcatgcagagataaggaagtcccacaggaagacctatgagtgtatatttgaccccagtcttcagatctcacctctctcctggagaagccaccacacacgaggcagcagtggggagctgggctggactgatctccccttcagggcacagactcatccttcatcaattgccatccagaggacagcccctcacctctctgtggatcacaggctgaggtcagccctcagaaatgcaggactcagagcttccatgctcaatgctgcacacagatgacaagcacctgggccactgcaggtattactgagggtgggttccatcccgtcagaataagaatccctgctaaagtggcacaaaagctctatttgcaaaatgcctcgactctaacgtgaagccagggttgagctccactcagagggggcgagcccagcacagccccatgttctggctctgccctccccttggggccttgttctcaccaggatccagacagtggatgacaaaggcacaaaaataatcacacagaacaggcaatgtggagaaggggtagggtgagggttgggctgtgtgtaaggaaaataaatcttggggccccaaatcactaagcaaaagggaaaagtcaagctgggaactgcaagggaaccagactccccttctattcaaagtcatccctctgctccctgacacagatgcatatctgagtgcctccttcaaaagactaattagaaactcaaaagaaggacccagcacagtggctcaggactgtaatcccagcactgtgggaggccaaggcagtcagaccacttggggtgaagaggtagggactagcccagccaacatggtgaaaccacatctctactaaaaatacaaaactgatccgggcatctacttgggaagctgaggcaggagaatcacttgaacccaggaggcagaggttgcagtgagccgagattgtgccactgcactccagcctgggggacaaaacgagacttcatctcaaaaaaaaaaaaggaaactcaaaagactgcaaccatttgtgcctcagttctctgtgaactaaaagccccttccctgcttcaagtcttcctgcctttatttaaagttgtcccactttcccagaccaaaccaacgtacttcttacatatgttgatgtctcatgtctccataaaatgtataaaattaagctctgccccgactatcttgggcaaaataaactttctaaattaactcagatctgtgtaagattttctggttttacagtggcaatgtcaaatgggagatcacaaaggaaacccggagaagatgataccagaacaaggacctagaaaagaaaggctgcttgtcacttgcagctgaggggaagagagtcctaggcagagggacagctcaagtgaaggccctgagacaggagcaacctcagccccaggaataggaaagcagcctgtgtggctggaacagtggaagagaggagggcacaagtaggagatgaggagaaaaatgttcaaaatatacacaactgtgcacacacagcaataggtgtttaaaacactgaaaaagaggcagctgtagaaatgggatctgagcaaatgcttttctcatgaacacatgggctctgctaaaccaaggttccaagtcaatccagcccatccttcaacatctgtagagaatattatggaccagagggaattgagggagacacttacttagaagctcacagatcaccattttttcagatgatatgaggaaagaaaatggaataggctacttgaactaaattttcatgttagggtaaggaaaaaaggtccttgatatctttatcaagtacacactgaaacaacctaaaattatatatcacgtagtagaaaacgttttcgatatatgataaagactagaaagcacacagacctcaatgtaaactgaacacaatctcatagagaaacaattttaaaatggttaaaaaatatagatctaatgaaatcttgggtcaaaggagaaatatttgaaaatataccatactttgaaaacaatgaggccaggcatggtgacacgcctataatcccagcactttgggaggccagggcatgatcacaaggttaggagttcgagaccagcctggccaacatggagaaaccatgtctctactaaaaatacaaaaattagcaggaaatggttgtgcacacctgtcgccccagctactctggaggctgaggcaggagaatcccttaaccccaggagatgaaggttgcagtgagacgagatcatgccactgcacaccagcctgggtgacagagtctcaataaataaaaatatatatctaaacattagccaggcctggtggggcgtgcctgtggtcccagggaatccagaggctgaggtgggaaaatcacttgagcccaggaggttgccgctgcactgagctgtgatcctgccactgcactccagcctggacagcagtaagagtgtctcaaaaaaacagaaattaaaggcccggcagctgctcatgcctgtaatcccagcaccttgggaggctgaggtgggaggatcacctgaggtcaggaattcaagaccagcctgaccaagatggagaaaccccatctctactaaaaatacaaaattagccggccatggtggtgcgtgcctctaatcataactactcaggaggctgaggcaggagaatcacttgaactccagaggcgaactttgcagtgaaccaagatcatgccattgcactacagcctgggcaacaagagcaaaactcagtcaaaaaacaaacaaacaaacaaaaaacaaaaaacccgacaacaacaaaaataagtaaattaaaagtaaacttaaaaaatgaaaagcaactaatgaggcaaagcatggtggctcacacctgtaatcccagcactttgggaggccaaggcgggtggatcacggggtcatgagttcaagagcagtctggccaagatggtgaacctctgtctctgctaaaaataaaaagtcagacaggtgtggtggcagctgcctataatcccagctgcttgggaggctgaggcagagcattgcttgaacccgggaggtggaggttgcagtgagtcaagatcactccactgcactccagcttgcctgacagagaaagactccatctcaaaaagaaaaaataaatgaataaaaacacacaaaaaaaccaaccacatgaatgaaatgaagaggaactagaaaaaaggaaaccaattacaaaaagagaacaaaagcacttttaatactcctttcatcacgttccatatagtaacagagactcagtcacttcttaccctacttctctcccccactccccaccccagccatgaaaagggaagagggtgatccacaactaacgagtcaagtcactgtcctctggctgaagaggggttgcagagggaagctgcctctgatgccatcattataaaatgcaccacacttagacacaggagtttggcaactctcattctcatctgtataatttaaactaattttaaatttgttaccttataaacagagaaagcaacatgtcatcacttcatcatcacatccaatcaactcaccgctcatctgcacccagggtcccccttcatcttcattactgttccatcattctatacatagctctttctcaccttctctctccatctgtttcttttctgcatttccccctggacttctgctcattttatgcccctctcctgttttgcttcattcttttttgttttgttttgttttttagtatttattgatcattcttgggtgtttctcagagagggggatgtggcagggtcatacgacaatagtggagagaaggtcagcagataaacacgtgaatgaaggtctctggttttcctaggcagaggtccctgcggccttccgcagtgtttgtctccctgggtacttgagattagggagtggtgatgacttttaaggagcatgctgcctttaagcatctgtttaacaaagcacatcttgcaccgcccttaatccatttatttaaccctgagttgacacagcacgtttcagagagcacggggttgggggtagggttacacattaacagcatctcaaggcagaagaatttttcttagtacagaacaaaatagagtctcctatgtctacttctttctacacagacacagtaacaatctgatctctcttgcttttctccacatttcccccttttcttttcgacaaaaccgccatcgtcatcatggccagttctcaataagctgttgggtacacctgcagaaaggctgtcacttcacacttggaagattgcacagcggccaggcagaggcgccccccacctccccgacggggcggccgggcagaggcgctccccacttcccagatggggcggccgggcagaggcactcctcacttcccagaaggggcggttgctggacagaggcgctcctcacctcccagatggggcggccgggcagaggcgctcctcacctcccagatggggcggccgggcagaggcgctcctcacctcccagatggggcagccgggcagaggcgctcctcacttcccagacggggcagctgctgggcagaggcgctcctcacctcccagacggggcagccgggcagaggtgctcctcacatctcagacggggcggctgctgggcagaggcgctccccacctcccagatggcgtggccgggcagaggcactcctcacatcccagacggggtggccaggcagaggtgctccccacttccccgatggggtggcggctgggcagaggtgctcctcacttcccagatggggcggccgggcagagatgctcctcacttctcagatggggtggctgggcagaggcgttcctcacctcccagacagggtcgcagtcaggcagaggcgctcctcacatcccagacggggcggccgggcagaggcactcctcacttcccagacggggaggccaggcagcggtgctcctcacttcccagacggggcggccaggcagaggcgctcctcacttcccagacagggcagccgagcagaggggctcctcacttcctagacggggcggccaggaagagacgctcctcacttcccaaacggggtggtggctgggcagaggcgctcctcacttcctagatgggatggcggccgtgcagaggtgctcctcatttcccagactgggcagccgggcagagaggctcctcacatctcagacaatgggtggccaggcagagacgctcctcacttcctagatggggtggtggccgggcagaggctataatctcagcactttgggaggccaaggcaggcggctgggaggtggaggttgtagcaagccaagatcacgccactgcactctagcctgggcaacattgagcactgagtgagcaagactccgtctgcaatcccggcacctcgggaggccaaggcgggcaaatcactggaggtcaggggttggagaccagcccggccaacatggcgaaaccccgtctccaccaaaaatacaaaaaccagtcaggcttggtggcttgtgactgcaatcccaggcactcagcaggctgaggcaggagaatcaggcagggaggttgcagcgagcccagatcacggcagtactgtccagcctcggcaacagagggagaccgtggaaagtgagaggggaaagggagagagggagggagagggagaggcagaggcagagggagagggagagggaaagggagagggagagagagagggagagggagagcttttttttgttttttgagatggagtttcgctcttgttgcccacactgaagtgcaatgatgcgatctcagctcaccacaacctctgcctcctgggttcaagtgactctcctgcctcagcctcctaatccaaaattatcagggcacggtggcccatgcctgtaatcccagctactcagggggtagtatcgcaggagaatcgcttcaaccctaaaggcagagatactcattagccaagattgtgccattgcactccagcctgggcaacaagagcaaaactccactgcaaaataataataataataattagtatgtaggccaggtgcggtggctcatccctataatcccagtacattgcaaggccaagacaggaggaacctttgagcccaggattttcagtccagcctgggaaacatactgaaaccgtttctacaaaaaaaataaaataaaataaaaaataaataaataactagccgggcttggtgtctcacacctgtggtctcagctactcaggagactgagggaggaggatcacttgagcctaagaggtcgaggctgcagttagagtagataacgccattgtactccagcctgggcaatagggccagaccctgtctcaaaatattaattaattaattaattaattaaaagtattatgtaataacagaaagttgtttttttctttttccccacatcactgccccactttctaccccaccctgggaaaagggaagaaactgactcacaactgagtaagtcactgccctcgggctgaatagggattccaagtggaagctaacctctgacaccaagatttatagaatgtacatgactcacataggaattttaaaattctcaaactcatctgtataatttaaacaagttattagattatatacacagaagtcaacatgtcacaactaatcatatccaatgaactcacacactcatctgtatccaaagtcccccaccctttttttcttttaaaacagggtcttgctcttttcaccaggctggagtacagtggcatgatctctgctcacagcagcctggacctcctgggctcaagtgatcctccagcctctgcctacagagtagctgaaattacaggtgcacattatcatgcctggtttttgttttcgtttttttttttttttttttgatagagatgggggcaatgactattttgcccaggctggtcttgaactcctggattcaagcaatctctctgtcccagtctcctaaagtgctgggattacaggcatgagccactgcgcctggcccctctttcttcattactgtgcttccctccctaattctgtgcatatctctcattctccccttctctttctagctcttgttttcttttctttttccctgggattgtgctccttattttgtacctctctcctctcctgcaatttatccccttcttccctctattgcttctcttccacctcttctgctccatcctcacaacttatttaaccttttttttttttttttttttgagacggagtttccatcttgttgcccaggctggagtgcaatggtgcgatcttggctcactgcaacctccgcctcccaggttcaagcaattctccttcctcagacttcctagtagctggcattacaggcatgtgcaaccgtgcctgccttattttgtatttttagtagagacggggtttctccatgttggtcaggctgctctcaaactctggacctcaggtgatccgcccacctcagcctcccaaagtgctgggattataggcatgagccacagcgtctggtccttattgaagggggccagcccctccacacctgtgagtatttctcatcaggtgagatgagagactgagaaaagaaataagacagagacaacgtatagagaaagaacagtgggctcagaggaccagcactcagcatacggaggatccgcaccagccgaggtctctgagttccctcaatatttattgatcactatctctaccatctcagagagggggatgtggaaggactgtagggtaatggtggggagaaggtcagcaggaaatcatgtaagcaaagctctctgtgtcataaataagtttaaggaaagatgctgtacctcgatgtgcatgtagggtagatttatgtttgactttacacaaacatctcagtgcagtaaacagcagtattgccaccagcatgtctcacctacagccataaggcagttttctcctatctctgtaaacagaacatacgattgggttttacaccaagatattccattcccagggaggagcaggagacagaggccttcctcttatctcaactgcaaagagggctatctctttcactaaccgtcctcagcacagaccctttacgggtgtctggctgggggatggtcaggtctttcccttcccacgaggccatatctcaggctgtctcagtggagagaaaccttggacaatacccaggctttcttgggcagaggtccctgcggccttccacagtgtattctgtcccagggtactcgagactggagaatggcgatgacttttaccaagcatactgcctgcaaacacattttaacaaagcacagcctgcacagccctaaatccattaaaccttgggtcaacacagcacatgtttctgtgagcacagggttgcggctagggttacagattaacagcatctcaaagcagactaatttctcttagtacagaccaaaatggggtttcttatgtctacttctttctacatagacacagtaacagtctgatctctcttttttttccccaaaccttatttaacctcttgttgctccttctccccaatctttcaatcgtcctcaatctctatatattaccgcctcttctcttatctctccatctcctctgctctccctgttaaattctctcttccctgttacagcccccagtccccactctctagcaccccagatccccaggtgtcctccctgctgtggttctccctctggtctccgtgccaccagcaccactctgctctgtctgccctggctccaaatccctcctcctctccctcactctggtgagcctccctctttgctgcccctctccctatcttgtccttcatctctgtacatctagctcttctctacatttctccagttgcttttctcctcctgctttcttattttttctttcacttttgctgtctcttggcaaatttctcacccatcctctactttgccatctgttacgggcctttctcattcttcttttctctgtctctggttttctactgctctctcagtccctctctctatctcctcatctctttgacccaaacaatcacacgcgggtttggagtaagaggcctacatcctggagaagcgcattttccaggaggtggagctgggcaggcaagaacacccggtgtcataggacaaggccctgggacctccccaacgctggctcaggggaagcggtgactgcggagggaagacttggggagcagcagggcccggcacgaggagggacatagtgggagacggcgccttaagacatgggtggcacctgcaggctcccaggaccaggcagaggacccagcctccccaggactggggccccggcgctgcgctccaggggaggccgacgggggctgggaggcgcccagggcgggaatccagcgcacgggtgaggactttaaaaagcaaggggcaggatgagtcaacaaggttttgagcaggaaaactatgcgataggaagtgtatacattgccctatagcagaaagaccggggacgggaccagcctccaagcgacttcaaacccaaaaggaagcaacttccagactcttatgggcgtctcaatttgctctgggtgaaggaagacaggcaagaatttccaggtctgtgaggaccccacgtcccagggacagaagtgccagggacctgggaagtgcagacttaatacaaggcagagcaaaactcacgcgcctcggtaggacctttactccacgtgatccacttccgggtttgctgcgcaggacagaagccagtcccgggtggggcccccgaacatggtggcggggcctgggtgggacagaggcggggcgcgaggcggagagaccttgccctttagaacaggcaaagggcggggccgggaccggacctgtgcatctctccgcctcgcacccagcgcctctgtttttcgggtgtttggaggtgagagcggccaggaaggctgaggcatgatacaaaagccctggaattatctggaacgggaatgcaaactagaatgtgaaatgcaaagccctgcctgggcggaacatacgatttcatgctgatggcccacagaacagaacagaactcctctccctttctattctccattcactcaggagggagagtccaccctgtgctcagcttcagagacttccctagagcctttgcttgggatgcgggactgggtgctcaggccagggaggagtgaggtcaccacctgctgcctaaacgcagcagggatgcgggcgtgaggccggaagcctgaggtcccagctactcaggaagcagcggcgggagaatcgctgaacctgggggtccaggccagcctgggcgacaaagtaacaccccctcccgcagtgctctcttcattgtctctctcgcgcgctctttttcttttctttcctttttatttatttttattttttgagacggagtcttgctctgtcacccaggctggagtgcagtggcatgattttggctcactgcaagctccacctcccgggttcacgccattctcctgcctgagagttgagtaactgggactacaggtgcccgccacgatgcccggctacttttttgtatttttagtagagaaggggtttcactgtgttagccaggatggtctcgatctcctgaccccgtgatccacctgcctcagcctcgcaaagtgctgggattacaggtgtgagccaccatgctcggccttgtgtttttttttttttttttctttttaaacaaaatttttcatggtgtgacacagggatccaacattattcttttcaatgtggatatccagttagttgtcccgcacgtttgtgaaagagatcaattactttctctttttttacttttttctttccttttacttttgagacagagtatttctctgtggcccgtgctggggtgcagttgtgagatcatggcccactgcagcctctgcctcctgggttgaagctattcgtctgcctcagcctttggagtagctggtattacaagcgcacatgaccatgcccagctaacttttgtatttttggtagagatggggtttcaccatgttggccaggctggtctagaactcctgacttcaagtgatccgcctgccttggcctcccaaagtgctgggattacactcgtgagtcactgtgcctggcccaggaaatattctttacttcactttttaaatgtgagaaaatataattgagaaacaaagagtcttgccccaaatgagaaatcatctccacgatgataatagagaaagaaagaataactattttattaataaataagctttagaccagaatgtgatgggaaataaaggcaaacagctaagaggttgaaaagagagaaagaaacgtcactgttactatacaacccatttagtacatgttttcaagataaacactaatcagtcctcagggaagaggacttgaaaagcccttggtcacacatagttcatcctggctctacttggtaatggaggtgaccatctctgtcagctaactagcttcatcccgaggcagggggagaaaccctaacactaaccctaacacaaaaattagctggacgtggtggcaggcgcctgtaatttttctgtatttttagtagagacagagtttcaccaagctggccaggctggtttcgaactcctgacctcaagtgatctgcccaccttggcatatcaatgtattgggattacaggcttgagccaccagggtcagccaggaaaaactcttagaagttgcacctgcattccgctagactctgcttgcatgaccacattcctctcaaggctcagaattatttacaggtccatagctttaaatttgaatcatttgatgtttgaattatttaatttcctactgagacacaggtactatctatcttgttgtgtgccttttttttttttttttttttgagacggagtctcgctttgttgcccaggctgcagtgcagtggtgcaatctcagctcactgcaacctctgcctcccaggttcaagcaattctgcctcagcctcctgagtagctgggactacaagcatgtgccaccacacccggctaatttttttgaatttttagtagagacaggttttcaccatgttggtcaggtggtcttgaactcctgacctcgggattggccaggcttggcctcccaaagtggtgggattacaggcgtgagccactgcacctggccgttgtttgcctgtcaaagtgagctcccaagttcttcagaaatacatccctgggccgggcgtggtgggtcacgcctgtaatcccaggactctggaaggccgaggctggaggatcatctgaaatcagaagttcaagaccagcctggccaacatggtgaaaccccatctctacaaaactataaaaatcagccaggcattacagcgggtgcctgtagtcccagctacttgggaggctgaggcaggagaatcacatgtacccgagagacagaaattgcagtgagccgagatcgcaccatttaactccagcctgggcaacaagagtgaaactccatgtccgagaaagaaaagaaaagagaaagaaagaatactaccctcagaaaacagaaaatgcatttgcaaattttctaaataaatctcctaagaaaagaaatgaaaggaaagaaaatctctttctttattttcaaaggaggaattaaacctctcatttacttccttgtctgtttgagatagggtgtagctcactcacccaagctggagtgtggtggcaaaaacagggctcactgcagccttcaactccctggctcaagtgatcctcccacctttttcatcaagcatttggaagagatatctacaaaatataaacaccaatacgtttccaattaagtccagacggtaaatcatactgaaatgtgtaaatatgacacaataaacaatacttactttaaacttcccaaacataatcttcaaagtttaggaacataaaaggagtaagattctttaataaataaagggagattacatgtccttcaaatcatttctatggaagcctatttccaataccatgacaaaacactgacagggcaccaacatgtgtaagcctaaagtaaggactgtttttccactgtgaccctaaagtgcatcacagtttgcaaaaaacatatcactgtcacattaatgaaaagtatatattcttcatatttacagaatatcttctgtatacaaataaatgctaaaggaccacaaaatatactatactggtaaataatccacaacaagctcatgtaagggtaaccaaaatcaatggaaatgctgtattgtcaaataatcatagcacaaagaagataagaaaagattacaaaattagccaggcatggtggcttgcgcctgcagtcccagctactcaggagactgaggcacaaggatcgcttgaacctgggagggaaaggttgcagggagccaagattgcgccactgcattccagcctgggtgacagagcgagactccatctcaaaaaaaaaaaaaaaaaaaaaaaaaagaaaagaaagaaaaagaaaacaatgttaatacaatatttttctgaatacctgtcataaaattacctataaccacacagaacaggcacttattgaaattaacaagtgcagtgtatcagttatattacatatcacatactgaaaagccatatgtgaaatcttaaatattagtcagtaaactattgtaacccatgataaaaccagcaagcaaataagtacatttatataggctgcagaattctaaacaattccctcttaagaaaaaagccacaacttttgcttatcaccagcacacaatataagaattgaaatacgtgttaagatcactatcttctgatgtatgagttcaagtaaatacacagcattataaggaataagaactgactaaccatgtcggagggtgcaattatgatgtcacaggtacagctgcatatcaccaggcaatacagcaattttgtatatatgcattgtccttcgttatctagtcaactgtgcaaaaaatatagaaagtgtactgggaaaatttatcaactgagatcacagaaaacattgtataaaacaaattgcacaataaaaccataaaaaacatgatgtaggccgggcgcggtggctcaagcctgtaatcccagcactttgggattccgaggcgggcggatgacgaggtcaggagatcgagaccatcctggctaacatggtgaaaccccatctctactaaaaatacaaaaattagccgggcatagtggcgggtgcctgtagtctcagctactcgggaggctgaggcaggagaatggcatgaacccgggaggtggaggttgcagtgagccgagattgcatcactgcactccagcctgggcgacagagccagactccgtctcaaaaaaaaaaaaaaaaaaaaaaaaaaaaaaaaacatgatgtaggctccttggtctgaaagattatattggccaaaagcgatgttcagagttgtgtccaataggatgttcctgcagatggggcctgtgagagaatttggtcatgggtgttgactacacatgaataggtctagtgcttttatttttattatttatttatttgtttactttttgagacggagtttccctcttgttgcccaggctggagtgcaatgtcacgatcttggctcaccgcaaactttgcctcctgggttcaagcaattctcctgcctcagcctcctgagtagctgggattacaggcatgcaccatcacacccagctaattttgtatttttagtagagacggggtttctctattttggtcaggctggtctcgaaccacctacctcaggtgattcacccgcatcagccttccaaagtgctgggattacaagtgtgagcccccgcacacagccaagactactgcttttataaagagagacattaaagagctgattgttatttctttttgtttgtttgttttttgagaccaagtcacgctctatcactcaggctggagtgtagtggcatgattctcctgcctcagcctcccaagtagatgggactacagatgcatgccaccacccctggctatttttttttgggggtgggggagacagagtctcactctgtcacccaggctggagtgccgtggtgcgatcgtggctcactgcaacctctgcctcccagctgggtccaaataattctcctgcctcagcctccagagtagctgaaattagaggcgtgtgccaccacgctcagctaatttttgtatttttggtagatacagggtttcatcatgtaggccaggctggtctcaaactcctgaccttaagtgatttgctcccaaagtgctaggattacaggcatgagccaccacgcctggctttgatgttcctttctttttctttatttttttttcagacggactctagctctgttgcccaggctggcatgcagtggcgcaatctcggctcactgcaacgtctgcctcccgggttcaaacaaacctctgcctcctgagtaggtgggattacaggagtctgccatcactaccggctaatttttgtatttttttttttgtagagatggggtttcactctgttggccaggctggtatcgaactcctgacctcgtgatccacccaccttggcttcccaaagtgctgggattacaggcttgagccaccgtgccctgatgtcccttttgaaaactactatgggctaggcgtggtggcttacgcccgtaatcccagcactttgggaggccgaggcaggtggatcacctcaggtcgggagttagagaccagcctggatcaacatgaagaaaccctgtctctactaaaaacacaaaattagccgagcgtggtggtgcatgcctgtaatcccagctattcaggaggctgaggcagtagaatcgcttgatgctaggaagccaaggttgtggtgagctgagatcatgccatcgcactccagccttggcaacaagagcaaaattccctctcaaaaaaagaaaaaaaaatggccgggcgggtggctcacgcctgtaatcccagcactttgggaggctgaggcgggcggatcacgaggtcaggagattgagaccatcctggctaacacggtgaaatcctgtctctactaataatacaaaaaattagctggtagtggtgacaggagcctgtactcccagctactccggaggctgaggcaggagaatggcgtgaacccgggaggcggagcttgcagtgagctgagatcgtgccactgcactccagcctgggtgacagagcaaaactccatctcaaaaaagaaaaaagaaaacagaataactcacagtattgagttattctgaataactcacagtattgagttattctgaataactcacagtattgagttattctgaataactcacagtattgagttattctgaataactcacagtattgagttattctgaataactcacagtattgagttattcagaataactcacagtattgagttattcagaataactcacagtattgagttattcagaataactcacagtattgagttattcagaataactcacagtattgagttattcagaataactcacagtattgagttattctgaataactcacagtattgagttattgagttattcagaataactcaatgtattgagggctaagtaggccagacacggtggctcctccctgtaatcccacccgtaatcccagtaatttgggaggccaaggcaggaggatcctttgagcccaggattttgagaccagcctaggaaacatagtgaaactccgtttctacaaaaaaaaaaaaaaatacaaaaactagccgggcttggtggctcatgcctctggtctcagctactcagaaggctgaggaaggaggatggcttgaacttaagaggtcgaggctgcagttagaggagatcacgccactgcacaccagcctgggtgatagagtcagaccctgtctcaaaatattaattaattaattaattaaatgtattttgtaacaacagacagtgactattttcccacttcactgacccacgtcctaccccatcctaggaaaaggggagacagtgattcacaactgaataagtgactgccctctggcaaatagggattccaagtggaacataacctctgatgccaagatttatagaatgtacatgtcttatagatacgaattttaaaattctcaatctcatctgtgtaatttaaacaagtttttagttattagattatatatacagaactcaacatgtcacaaccaatcatatccaatgaactcacccactcatctgaacccagtctctcgcccctttttttttgtttggagacaaggtctcgctctgacgaccaggctgcagtgtagtcacatgatctcagctcactgcagcctggacctcctgggctcaagtcatcctcccagcttggccaccagagcagctgggagtacaggtgcacaccattatgcccggttatttacttacttttttggcgggggggaggtctcactatgttgcccaagctggtctcgaactcctggactcaagcaatccccttgcctcagtctcctaaagtgtggagactacagactacaggcgtgagccactgtgtccagaccctctttcttcattactgtgcttccctccctaattctgtacatatctctcattctccccttctctctctagctcttgttttcttttctttttccctgggattctgctcttcattttgtacccctctcctctcctgctattcatccccttcttccctttattccttctcttccacctcttctcctccatcctcacaacttatttaacctcttattgctccttctccccaatctttcaatcgtcctcaatctccatctatttctgcctcttctcccatctctgcgcctcctctgctctccctgttaaattccatcttccccgatatactcccttgtccccactctgtgtctccccagatcccagctgtcctctctgctgtggttctccctctgttctccttgacacaagcaccactctgctctgtctgccctggctccaaatccttccctctctccctcactctgatgagtctccctctttgctgccactccccctaccttgtgatccttcatctctctgtacatctatctagcctttctctacatttctccggttgcttttctcctcctgctttcttaggtttttttttttttttttcacttctgccatctcttggcatatccctcaccaatcctctattttgccatctgttatgggcctttcttattcttcttttctctgcctcaggttttctactgctctctgtctcctgattcctttggcccacacaatcgcaacacggtttggagtaagacgcctgcatcccggaggagcgcattttccacgccctggagctccgcaggcaagaataccccgtgccgcaggacaggcccctgggacctccccagtgcaggttcaatgaaagcggtgactgcggaggggagacctggggagcagcaggccccggcatgaggaggaaggtgcggggcggggggggggggcgcgacggcgccttaggaccaggatggggtctgcaggatcccaggacctggcagaggactcggcctccccgggactggggctgcggcgcggcgctcccggggctgaggagggggaggctgggaggcgccctgggcaagaatccacatcgcgggtgaagactttaaaaagcgcggggcgcgaggagtcagaacaaggttttcagcaggaaaactacgcaacagaaagtgtatacattgacctatagcagaaagaccggggacgagaccagcctcaggacgactttaaacccaaaaggaagcgaccctcgggctctcacggggatgtctcaatttgctctgggcaaaggaagacgccggagaatttccaggtctgtggggaccccacgtcccagggacagaagccctgggaacctagttagcgcagacttaatacaacacagagcaaaactcaccgcggcgatatgacctacactccacccgatccgcttccgggtttgcgttaatctgcgcgcgcaggacaaaagccaggcctgggcgggaagtgggaggtaggcggggcctgggcgaggtaggggcggggcgcgaggcggagagaccttgccttttagaaccggcagagggcagggccggggcgggatctgcgcgtctctcagcctcgctcccagcgtctctgttttcaggttttggaggcgagagcgccagaaagtctgaggcatgatacaaaagccctgttgagagaagagagagaccctctgacattgttttatattgttttatagtcagtaaaaacaacaggaagtaaaaccaaagacaggcagccccgcgccaggcccgaaaccaggcctggatccgcctggcctaaacccagtagttaaaaatcaacttatgatttagaagctgatgttaggcatagattccagacattgtatagaagaacacggtgaaactcctgccctgttctctctctccctgatcaccggtgcatgcagcccctgtcacgtatcccttgcttgctcaatcagtcactatcctttcatctgaaatctttagtgttgtgagcccttaaaagggacagaaattgtgcactcggggagcttggattttaaggcagtagcttgccaatgctcccagctgaataaagcccttccttctacaactcggtgtctgagaggttttgtctgcgactcgtcctgctacactgtaattgtctggaacagggatacaaactagaatgtgaaatgcaaagccctgcctgggcggtatgtaccatgtcatgctgaggtcccacagaacagatagatatcctctccctttctattgtccattcactccggaaggagactccgccctgtgctcagcttcagagacttccctgaagccaccgcctggaatgccggacggagtgctcaggccgagaaggagtgaggtcaccacctgctgcttaaagacagcagaggcgcgggggcgggagcctgaggtcccagctactcaggaagcagcggcgggaggatccctgagcctcgggttccaagccagcctgagcgacaaaataacgcccactgccgcggtctccctttcttgtctctctctctctctttttttttaaaaaaaactttcgcaaataaaatttttgattgtgtgacatagggatccaacattattcttttccatgtggatatccagatagttgtcctagcacatttatggaagagatctattactttcttgtattattattattattattattattattattattatttttgagacagagtatttctctgttgcccaggctggagtgcagtggcgagatctcgactaaatgcatcctctgcctcctgggttcaagcgattctcctgccccagccttgggaacagctggcattacaggcgtgcgccaccatgccaggctaatttttgtatttttagtagagacggggttgaccatgttgaccaggccggtatcggactcctcactccaagttatttgcctgcctcagcctcctaaagtgctggggttacggcgtgagccaacatgcctggctaattttttgtatttttagtagagatgggatttcatcgagttagccaggacggtctctatctcctgaccttgtgatccgcccgcgtcggcctcccaaagtgctgggattacaggcgtgagccaccgcgcccggccagaaatattctttttttttttttttttttttttaaacggagtctcactctgtcgcccaggctggagtgcagtggcgcaatctcgactcactgcaagctccgcctcccgggttcacgccattctcctgcctcagcctccggagtagctgggaccacaggctcccgctaccacgcctggctaatttttttgggtttttttttttttgtatttttttttagtagagacggtgtttcaccatgttggccaggatggtctcgatctctagacctcgtgatccacccgcctccgcctcccaaactgctgagattacaggcgtgagccaccgtgccatgccgcagaaatattctttgcttcgctttttaaatgttgacaaaatataactgaaaactaaaaagtctcctcccaaatgagaaatcatctccacgacgataacagagaaagaaataaaaaccattttattaataaataaaccttagaccagaatgtgatgggaaatagaggcaaacagctaaaagattgaaaagagagaaagaaacttcactgttctatacaacccattaaggacatattttcaagataaatactaatcagtcctcaaggaagaggacttgacaacacccttggtcacacatagttcatcctggctctacttggtaatggaggtgaccatctgtgtcagctaactagcgtcatcctgagggagggggagaaactctaacccatgtctttttggcaagtgtgagttttacaacatggcgacaggtgccctctctggtgaggctcctaccatacgacagacactgatgtcagcagtaaataataaaatttaaagtatatgattaagtacagagttaatgtgaacacagagcttgaagaaagccacctggaaacatcaactccaaatgaatgggatcagcgttcccaagtagagacgttaaggtttcacacacagggaaagacagagaagctttagcagaatcaccacactttccattcaagaccagtgcacaggctgcagcaacttgactggtgatgatttgatacacttcaaggaaagttactttatcattacataagaagggacaatgctctgaggaggtcttatcactggggctctgtagtcttcctaatttttttattgttattgttatttatttatttattttgagatggagtctcgctctgtcaccaggctggagtgcagtggtgcaatctcggctcactgcaacctccgactccctggttcaagtaattctcgtggctcagcctcccgaatagatggtactacaggcaagcaccaacatgcccagctgatttttgtattttttttagggatgagatttcaccatgttggccagtataatctctatctcttgacctcgtgatctgccagaatcagtctcccaaagtgctgggatgacaggcgtgacccactgttcacggccagttttccaaattatttacagaaaaactcctagaagttgcgcctgcattcctctgaactcaggttgcatgaccacattcctctcaaggctcagaattatttaaaggtccatggctttaaattggaatcacttgatatttgaattacttaatttcctactgagacacaagtgctatctctgttgtttgcctttcagacagagctcccaagtccttcggaaatacattcctgggtcattaagctaaaaagcggtttagttagtttctaaaaaaattccatttctgtccgagcgcggtggctcacgcctgtaatcccagcactttgggaggcagaggcgggcggatcgcctgaggtcgtagtttgaggccagcctgaccaacatggaaaaaacccttctctattaaaaatacgaaattaactgggcatggtggcacatgcctgcaatcccagctactcgggaagctgaggcaggagaatctcttgaacctgggagacagaggatgccgcgagcggagatcacgccattccactccagcgtgggctacaagagcgaaactccatctcaaaaaaaaaaaaatactgtttcagaagacagagaaaattcatttacacattttctaaataaatgtcctaagaaaagagtctacaggaaagaaaatctcttactttattttcgaaggaggaattatgcctctcacttatttgcttgtttgtttgagacagggtccagctctgtcatccaggttagagtgtgctagtgagatcagggatcagtgcagcgtccaactccctggctcaagtgatgtttcaatctcagtgcccaaagcagccgagaacacaggtgtgcaccaccacacctggctgagtttttttatttttagtagagacgaggtctcactatgttgctcaggctgatcacacactcctgggctcaagcaatcctccggcattggcctctcaaagtgctgggatgacaggtgtgacccaccgctcggagttctggctttatttccatgaaataagaaattttcttccaccttctgtgtataataggcagttctatatgtcacctttctactttcattatccgctcaaacaacccaggaccttgcttggtttactaagccattcaaattatcagtccccgttgtaagcagcgccccactccacccctttaccgaggtacctgcccctgtaccccaacctgtcccagcctgaggggagcttgccccgcctgcaggacgcgcgactccacctgctcaaaaaaggcactttgccttaaaaccattttcaacttgggagaaaaaacgattcagcattcagtacaaaatggcccactaccaaatgttattttaccttcgattgtttgaaatgttaactgaaaacgggcaggaagcctccctgtgatattaggggtaatatgacggcacatcagaaacaatccaccaatcagaacccgggggatcgagtgctggagatcaagaggatgacagcaggccacatcatggacccagctgaggagagagccccgacgcatcgctgccaggccccgcccttaagaacaacaccccatttcaggccccgcctccaagaccagggtaaacctccggccccccagcaccgacccgctgtccagcctggcctccagcctcctccctcttgactcaccccaggccccgcccccaccttctaaccaggccccgcccccaaattgtggagtcaaatgcattagtaaatcagatacaaaatatctccccttattggtctctttttcagaatttaccggttatctgtgcacattaacatatatatttcacatgttatttctctgatctggtccacaaagagctgacatccagatgtggcccctgaaccatccaggctgcccagcagcactgacaccatggtgcccacaccccgtgtccatccatgtctgggtgtgagcccctcccaggaccatgcccagtggagcttcttaagaagttcttgtcactgggtcacaggagatggaatctcagagcagctgagaggaactgagggcaggcatgggtgagtgtgagtgaatgtgtcaggcaaaatgcttcagactcggaaaagactggctgctacaatacctggcatttcagaaaagaaagacacagattaatccacagaggaatatcacttcacctgaggaagagccagccctggctcctttcctttcctcttctgagctgcttcctcatgtaacattagtctttagaaatcaatcccgaatgtgaaaaatgaaaggggcctgccactccacacctgtggatatttctcgtcaggtggagacgagagactgagaaaacaaataagacacaaagacaaagtatagagaaagaacagtgggcccaaaggacaggcacactcagcatgcgaagacccgcaccagcgctggtctctgagttccctcagtatttattgatgactatttttactatcttggcaaggggagtgcagcagggcaacagggtgatggtggggagaaggtcagcagggaaacgtgagcaaaggaatctgtatcgtgaataagcttaaggaaatgtactgtgcctggattgtagggaaaagaaagagagatcagattgatactgtgtctatgtagaaaagggaactcgattttgatctgtactaagaaaaattgtttctgctttgagatgctgttaacctgtaactttagccccaaccctgtgctcacagaaacatgtgctgtattgaatcaaggtttaatggatttagggctgtgcaggatgtgccttgatttgttttgtttttcggaggtggagtctcattttgtcgtgctggctgcagtgcagtggcatgatctcggctcactgccacctctgccacctgggtcaagcgattctcctgcctcagcctcccgagtagccgggattacaggcaccggccactacgcccggctaatttttgtatttttagtagagacgggttttcaacatgttggtcaggctggtctcgaactcctgacccgcctcggcttcccaaagtgctgggattacaggcgtgagccaccatgcccggccaggatgtgccttgttaaccatgtttgcaggcagtatgcttggtaaaagtcatcgccattcgccattctcaattaaccagggagaaaatgcactgtggaaagccgcagggacctctgcccaagaaaccctgggttttgtccaaggtttacccccactgagacagcctgagatatggcctcatgggataggaaaggccttaccatctgccagcccacccataaagggtctgtgctgaggaggagtagtgaaagagggaggcctctttgcagttgagataagaggaaggcttctgtctcctgctcatccctgggaatggaatgtctcagtatagagctgaccattcccattcgttctattctgagataggagaaaaccgccctgtgggcgggggcgagatatgcgggcagcaataccgctctgttactctttcccacacggagatgtttgggtgaagagaaacataaatctagcctatgtgaacattggggcacagttcctttccttgaacttattcatgatacagattcctttgttcacatgtttccctgctgaccttctccccacctgttgccctgctacactcccctcactaagatagtaaaaataatgatcaataaacactgaggaaactcagagactgtgcgggtcctccgtatgctgagcgctggtcccctgggcccactgtactttccctatactttgtctctgtgtcttatttcttttctctgtctctcgtcccacctgatgagaaatactcacaggtgtggaggggctggcgcccttcactggatgtgcacgtaggccagatttatgtttcactttacacaaacatctcagcgtagcaaagagtcacagagcagtattgctgccagcatatctcacctccagccacagggcagttttctcctatctcagaatacaaagaatggtcagctttacacctagacattccattcccaggacgagcaggagacagatgccttcctcttatctcaattgaaaagaggcctccctctttcactaatcctcctcagcacagacccttcactggtgttgggctgggggatataaggtctttcctttcccacaagaccatatctcaggctgtctcagtgggtggaaaccttggacaatacccaggcttacttgggcagaggtccctgtggctttccgcagtgcattgtgtccctggttaatagagaatggagaatggcatgacttttacaaagcatactgcatgcaaaaatactgttaacaaggcacagcccacacagccctaaatccattaaaccttgattcaatacagcacatgtttccgtgagcacagggttggggctaaatttacagatttatagtatctcaaagcagaacagttttgcttcatacagatcaaaatggagtttcttatgtcttccttttctatatagacacagtaacaatctgatctctctttcttctccccacaaaaaaaaatatgagacttcatgttagaaatgactcattcccttcctggggcaaaaacccacagacaggagagatttcacccgtagaaagatggtcgtctgcttcccactgcaccagagatcatgcagagataagaaagtcccacaggaagacctacaagtgtatatttgacccaggtcttcagatctcactcccctcctagaaaacacccacatacgaggtaacgggggggcgggggggagctgggctggattgatctcccctcggcacagactcgtccctcatccctcatcaatccccatctggaggacagcccctcactctctgtggatcacaggctgagctcagcactcagaaatggaggacacagagcttccatgctcaatgctgcacacagatgacaagcacctgcgccactgcaggtattactgagggtgggttccaacccatcagaataagaatccctgctaaagcaacacaaaagctctatttgcaaaatgctctgcactctaatgtgaagccagggttgagctccactcagatggggcgagcccagcacagccccaagttcttgctccgccctccccttggggccttgtgctcactaggatccagagagtggatgacaaaggcacaaaagtaatcacacagaacaggcaagatagaccagaggtggtgtgagggttgggctgtgtgaaaggaaaataaatttggggaccccaaatcactaagcaaaagggaaaagtcaagctaggtactgcttagaaaaccagactcaccttctattcaaagtcaccactctgctccctgacatacatgcttatctgagtgcctcctttggcaacgctaatcagaaactcaaaagaaggacccagcacagtgcctcaggactgtaatcccagcactttgggaggccaaggcaggcagatcacttggggtgaagggttcaagactagcccggccaacatggtgaaacatctctactaaaaatacaaaagttatctgagcatggtggcatgcacctgtagtcccagctacttgggaagctgaggcaggagaatcacctgaatgcaggaggcagaggttggagtgagtcaagatcctgccattgcactccagcctgggccacagagcaagacttcatctcaaaagaaaaaaagaacctcaaaagatcgcaaccatttgtgcctcacttatctgtgacctggaagccccctccctgcttcaagttcaagtctccctggctttgtttaaagttgtcctgcctttccagaccaaaccaacgtacttgttactatattgactggtgtctccctaaagtgtataaaattaagctgtgccccgtccacctggggcacatgtcatcaggaattcctgaggctgtgccacgggtgtgtcctcaaccttggtgaaataaactttctaaattaactgagatctgtctgagaagtcctgggctcacagctgcaatgtcaaatgcggatctgtgtgagatcacaaaggtttccacacagaaggtgataccagaacaaacacctagggaagaaatgatgcttgtcacttgcagctgaggggacagagagtcctaggcagagggacagctcaagcaaaggccctgagacaggagcaatctcagccccaggaagaggaaagtggcccgtgtgggtggagcagtggaagaaaggagggcacagatagatgaggtcagagaggtcctgggggcacagatccatagggacaaggtcttcaaacatttttctcccacaacccaaaagaatattgaaaaccaactctgatcccagctattcgagaggctgaggcaggagaatcgcttgaacccgggaggtggaggttgcagtgagccgagatcgcaccactgcactccagcctgggccacagggcgagagtcagtctcaaaaacaaacaaacaaacaaacaaacaaactgagcactaacctctcgagaagaaaagccacacactgtattttgccagtcatttcaggggtcactgtcactgtgactgagcttttccagtcttattcctcacctctatgttaaggggggctcactgaggctcacaacgggagacatttcaccaagttatcctgagaagctctgaggtgagtagaaaataggtgtggctgactcccacgagatggcctggaagggccaataggctgccttggtcttcctcctctggaaaattgcaagatcagacgggagtcgtggcccagctgggtaatcccagcactttgggaagttgaggcaggcaggtcatttgagcccagaagtttgagaccaacatgggcaacaagggagtctggtttaataactatatttcctacaactagcatataagggggctttacacaactttgcaaaggaactgttagactggaatttaggtcgatagtataaaatggcttacgatctcttgtttctatagcttgatttccagaccaaattttaatgcggtatgaggccacagtaagactctataattttggatgttcaggaccagaaacagaacttattatctttgttcttggagtagagatttttttttctccccattcccaagggtagaaagacggcaattttttgtgcttatgtttggctaaactttttgttaagtcactgttaacagctggactcacttctgcactgggacatgactgagtttgtcctgtgcaattgtggtagaattgacctcgaggtgcccaatctataatagttccgaatttatcattttgtaatatcaccgcactattggccacacattcttcccaaactaaaacttttgtgtcttttgatcctttgggattttttgggggtaaggctttcctttaggcctaaattttaatgatctttgataagaaaagtcttgtaaataatttacctgtggcctgagtgacattccacttaccgcgtgattagtgaatctactggtggtaccgacagtaggtacttctaccaaccaatttttgactgcaggcattaaacatcctggtgctctcccgaggcaaataggaggataatgatacccagtggaaatatttatcatcattccttcttcctcaggtttggcagggcaacgatcatctgtggggccaggtacccatacactattattaacgtatacttcaataggattatccatccatgagactgcccgaattaagggcgggaaaggcacataggcccagtaggtataattagctgcagctgctcctgcaggcgtggggagacttaccaccgttgatacaatcatcaaagctgcaagcagcgtgttctctggagtttgtgtcacctttgtgttctctaggcttttttaagctaactgtgtcagcttttaaattgtgcccaagttggcagctccgccttcgtggtggatggcaacttcatctgtttttttgacatcaccattttgtttatcttgtgagtcaatggtgctcgattgcggtgtttccgtctctgtggaggcgcttttttttttgtttgtttgcatctctaatgggttcattgtagaactttaaatgtctagtgggtatctaaacaggaagctgattttctcctggtgaaacacaagcaaaacctctcccccacgttaccaccttccctatttctcatgtcttattgttgttgtctttttatcaaatcagttttccttcacgtaggctgttctttttaccagtaagatgttgttttgcagaggtagtagtctgatttctataagtgtttaaaacatttaaagtatagagtgctagattaagttgcatctgaggagtggtacactccttactgtctcccccttctctttaactgagttttgagtgttctattagtttttttaactatggcctgtccttgggaattatagggaattcctgttttgtgtgtaattttctactgatttcagaatttttggaaagctttactatagtatccaggtgcattgtcagttttgatttttttctggaactcccatgacagcaaaacaagataataaatgttttttcacatgggaagtactttctcctgtctggcaagttgcccacatgaaatgtgaataagtaccaactgttacacggacacatcataatcttttaaatgaaggtacatgtgtgacatctatttgccataatgcattaggacatagacttctgggattaactcctgcctcttgagtgggcaggtgtaggacttgacactgggtgcaatgttgtacaatatcttttgcctgttttcatgtgacatcaaatttgttttttaatcctgctgcatttacatgagtcaaagcatgaagttcttgtgcttttatgaatgcagatggtaccagtaagtcagcttgttcatttgctttagctaaaggccctggtaaattagtgtgtgctaaaatatgagtaatatgaaatgggaaatttttttttcagtttgttgtaataaactgaacagctcgtttaactgatcatctatgctatatttaattagagctgtctcaacatcccttgtagcctgcgctacatatgcagaatctgatacaatattaataggttgatcaaagtcttataacactgtaatgactgcaaccaactctgctctttgagccgattgatattgagttttgatgactcgctgttttggccctgtgtaagctgcttttctattgctggaagcatcagtaaacactgtcagagcattttccaaaggtttatgtctggtaattttaggtaaaatccaagtagtcaattttaaaaactggaagatttttgtttttgggtaatgattatcaataattcccacaaaattagtaagaccaatctgccatgcatcagaattgataaaggcttgtctaacctgttccttgtttaaaggaacaactattttgtctgcgtcattttcacacaattttattatttgtaatcttgcctgaccaattaatgtagctatttgatccaagaacaatgtaaaagtcttaattgtactgtgaggaaggaatgaccactccacaagatcagtattttgaacaatgatgtctgttggagaatgtgcagtagcaaaaatcaaaagttggagtggggttaagggacctttgtgctgactgatttttttcttttactaacttaattttttttgttgcctctggggttaatattcttttactatttaagtctgggtcccctcttaagatagagaacaaatttgacatggcataagtaggaatgcctagagttggctgaatgtaattaatatctcctagcaagttttgaaagtcatttaatgtttttaatgtgtcttttcttatttctactttttgtggcttaatttttctattttctatctgcatctctaaataatgaaaaggagtagaggtttgaatcttatcagatgctattgccagtcttgcgttggcaacctctgcttgcagaaatgtgtaacagtcagttaatttgtctcttgtttctgcagcacacaaaatatcatcaacataatgaatgatataacagtctgaaaacttatctctaactggttgaagagcttgacctacgaaagtctgacaaatagttggactattaagcattccctgaggtaacactttccactgagacctggtggctggttccttataatttatggctggtatagtaaaggcaaatttttcaaaatctttctccaccagaaaaatggtaaaaaagcaatcctttagatcaattataattaaaggccagtcttttgggatcatgaccagagaggacaacccgagttgaagaggccccatgggttgaatgatggcatttacggctcttaagtcagttaacatacaccatctgctggattttttctgaattacaaacacaggagaattctaaggagagaaagtgggtgaaacgtgtcctttttaagtagttttttaactattttatgtagcgcccccaaattttccttagggagcagccactgtttgactcagacaggatgctgcaaggcaagtctgaattgctccttcaccataatgaactgtaagttgggcaataatgggcacagcgagccaagttgcagtgagcctagtttcaggctccctcccccagcactcacttggctgaggaggaggtggccatcgtggttttagcccctatgaccccgatgattctggacctttttcttttaactttaatgtttcagaatatattacctcttgtaattgattgtagtcaacattttgctttgaccgacccattacagactctgctacatatttacaatgtgaactttccgttcctttctgggattctgtccctgtctcttcttcacaatctattacatagcttttagggccatcagaaactgaaacgctgtcttctcctgtttgaaacggttttaaagctgctttaataatggcccaatcattccataccataagtgggatgattttaccctccctacttctctgttttaattctttgccaattttttcccaatcttttagatctaaagttccctgttctggaaaccatgggcagaattgttctattgtttcaaatagcttgattagattttctgtagagactctaactcccccttttcttaaaagaattttaataaagctgagataagaggcatatttacttttagcttgtcccattgttaccctggcttttttcgagctcaggagcttaccgcaaggctgaccgtagaagtacttgggaatctctcgttgacttgtcctcaataaccacgctcaagcgtaggtttaccctagagaaaagccccacattagacaccaggtgaaggtggccagcccctctacacctgtgagtcttttttgtcaggtgggacgagagactgagaaaagaaataagacacagagacaaagtatagagaaagaacaaagtatagagaaaggaccggcgctcagcatatggaggtcctgcacaggcactggtctctgagattcctcactatttattgatcattatctctaccgtctcagagagggggatgtggcaggacaatagggtaatagtggggagagggtcagcaggaaaacatgtgaacaaagatctctgtgttatgaataagtttaaggaaaggtgctgtgttttgatgtgtacgtacacaaacatttcagtgcattaaatggtagtattgctgccagcatgttttacctctagccctaaggtggttttctcttatctcagtaaacagaacatacgatcaggttttacaccaagacattttatttttagggaggagcaggagacagatgccttcctcttatcttaactgcagaggccttcctcttttattaatcctcttcagcacagaccctttatgggagtcaggctgggggacagtcaggtctttcacttcccatgagacaatatctcaggctatcacatggggagaaaccttggacaatacctggttttctgaggcagaggtccctgcggccttccgcagtgtattgtgtccttgggtatttgagattagagaatggggatgacttttaccaagcatactgcctttaagcactttttaaacaaagcacatcctgcacagccctaaatccattaaaccttgagttgacacagcacatgtctctgcaagcacagggttggagctagggttacagattcacagcatctcaagacagaagaatttctattagtacagaacaaaatggagtctcttatgtctacttctttctacatagacacagtaacagtctgatttctctttcttttcccctcacttatcttttctaccatctgaccattttgttcagatctgctgaacatagtgtgaacgtgacacatagactgagaagtgcaattcaagctaaatatcccttaggggaccagtcaataatgattccatgggaatcattgtgcagcacctctgcctgttctgcaatgcaatcttgctaaacaaatacgttcattttttctaactgagtccaatcctgtttacaaataggtttttgggggttgtatgcctcaattacaggagcagatttattatggtaaatactgagatcagaaagcatgtgtaactgtgtcatacagtgatttacatccaggcattattaccagctaagattgataaatatgcctaataagtacaattgttctctgtgtcagcctttgttgaaggaatactcacagaaatggtgatcactgccatcatagctaccattaaattattcactgtgagtggttgtcctgctttcctcaggttgtcttcctggatctgtgacagcttcttgatctgtctccaggtcggtggctgtattcgatgggtgttgctcgtgacagttggggtcctcctcggcaccagccttgacatggctgcaaccgggggggtcctcaggatcctcccggaatctcttccttggcatctggcccatgacaagatttcaggtgtcttgatggtatccaaactgactgatgattttggcctggagaaacacaagcataacctctaccccaagttattattttacctatttcccaaatttttgttattggatctctctgccaaatcattcttctgcttctgtctttgcagctggtttctgtagatgctgttcagctgctgataacatctggcctttgggcaggctcaaaaaatttaaagttaataatgccagattcagttgctcctgtggtgttccatattctctgtctccccctttctgcttttgcaactgctgttttagggagagattcattctttccactatggcttgtccttgagaattgtacgggataccagtaatgtgtttaatattcctcatagagaaaaatgtagctagaacttggctagtatagcctggggcattatctgtttttatagaagcgggaatgcccatcaccacaaaacactgcaaaagatgacatttaacacaggcagaagactctcctgtttggcatgtaagcccagacaaagtgagaaaaggtgcccacacatacatgtacataagctagtctcccaaacgagggaacatgtgtgacatccatttgccaaaccgagttaggttccaatccttgaagattaactcctcctgtaaaagatgaggaatgtatcatttggcaagttgggcatcagtggataatatttttagcttctttccaggtaatgctgtatctgcatttgagaccagaggcattaacgtgggttaaatggtcaaaatgtctagcattagatattgcattagcaactaagtgatcagccatttgattcccttcagtcaaaggtcctagaagaggtgtatgagcccaaatgtgagtgatgcaaaaatggtgcattctacttctaactgctgtttgcaattgggtaaataaagtcatcagttgttcatctgtatgaaattgtaattgagcattttcaattaactgtgtggaatgaaccacgtatgaagaatcagaaatcacattaataggtatatcaaaagcagtcaataactcaattacagctactcagctttttgagctgaagtatagggcgtctgaaaactttactttttgagccaaactaagaagctttaccattactagacacatctgtgaaacaatgaaaacgcttagcaggctgcaggttgtttactgcaggaattgtaaatgcaaaccattcacagtcttgttcagctaaggggatagtaaagaaacagtcttttaaatctatgactactaaaggccaatttttggaattttagtaagagaaagcaatccttgctgtaatgctcccataggttatatagttgaattgatagctcttaagtcagttaacatcctccatttacctgattttttcttaattatgaaaactggagaattccaaggggaaactgttggagcaatatgcccattttctatctgttcagtaactaatttctctaaagcctccagtttctctttacttagtggccattgttctatccaaattggcttatctgtgaaccattttaaaggtataggttctggaggcttaacaatggccaccatcaaaaattatttcctaatctttggcgggaactttttaaaccttgcaaatttttttgtagtcccataccagggacataccccatttcatgcatcatatgttgactttgagggctatataattgttctggaattagaacttgggctctgcattgttgtaataaatctcttccccataaatttatagatacagaagttataattggttgaatagtctcgggttgtccatcgggcccttcacaaggcaaaacagaactactctgatatacttcaggggcttcaccaactccaactatgttaaattgagtgggttgaattggccacgtggacggccagtgctgtagagaaatgattgaaatgtccgctcttgtatctaccaaacctttaaatttctttccctgaatagttatttcacaggtaggacatttatcagtaatttggttgacccaataagctgctttgccttgtttatttgtgcttccaaatcctcctgttcgtttaatttcactttttcccatttccacatatggcacaatcaggagctgtgctatgggctctcctggctctgctttccaggaaacataagtaggtataacaatttgaatttccctattgtaatctgaatcaatgactcctgtatgtatttgtaccccttttaaacctaaactagactttcctaaaagtaatccgattgtacccgctggcaagggtccacagactcctgttgggaccttttgcgggggttccccaggtagaagtctcacagcttttatgcagcataaatctactgtggcactaccggctatggcgggggacagacattgtacaggggtgagggaatggtctgagctggaaatgcccccgtttagaatggggcccgggacaggcccctcatggcatttcccgaaatcgtattcccatctttatgaaacttagagggacactgattagcccaatgttttccttttttacattttggacatatttcaggatctgcagttttcttttttcccctatctggtggcctgattcgctgattttttctacatttgtttttagtatgaccatgcttcccacagttaaaacaagcgccaggaaatggagtatttcctttgtccactctcagtcctgccattgcctgtgccaacaaggcagctttatgcagattacctccgataccatcacaagccttgatataattaactaaatgtgctttccttctaataggtcacagagcagcgtggcaattgggattacagagcgagactccatctcaaaaaaagaaaaaaaaaaagcattgtcaaaacttaataactgcaacactatatcctgagcagctgaatctgcaatcatctttttaagagacttctgtaaccaagctataaaatcaacgtatggttctcttggtccctgtttcatagcactaaaggaagggtattgttctccacatgaagtgattttttcccaagctctaatgcacactcctctaagctgttctatggcatcatcctgcatgaccagttgggcacctaagccagcccagccaccaacccccaaaagttggtctgcagttacattaatttgaggttgggcctgggcattgcgagcagcctgaatggaagcttcatctgcccaccaagttttaaattgtaagaactgagcaggagttagataagctcaagtaagacagtcccagtcagtaggtatcatctgactggaaatagcaacattctttaacagtcccattacaaaaggagaacctggtccatactgatttataacttgtttaaattctttgagtaacttaaaaagaaaaggctcaaatatagttgtaatatttccctgttgatctggggggtgtattctaacagggaactgccaagtctctaaatcaccctctcttctagcttgctgaattcctgcctgaatagaactaagagcgattgcttgaggcactgatcaaacagtcactggggcaactccttttcacccagtgttctccagaaaagaaagatctggaaggtcattttcttcaaaataataatgagggggtgcagaaaggtagggatgaacctcttcctcttttgccgctttagctttagctggcaaataaacctgctctgtaacctcttctgtcacttcctcctcatcataactgtgaataagttccaaggtggaacgaaccagaccccacacctgtcccattgttaccctgaggcttctgagctcctcttgttactcaccacagggattgctttaagagtacttgggtgtcctccagctagttttccattccaactgtcgctccggtgacccttcaacctggattcgagcccccatgaaggtacgccacttgccgagaccagctcagtcagggagaccctaacccagtggtgctacaggaatgaaagacacacacacagaaagatagaggtgtgaagtaggaaatcaggggtctcacagccttcagagctgagagccccaaacagagatttacccacgcatttattaacagcaaaccagtcattagcattctttctatagatattaaattaactaaaagtattccttatgggaaacgaagggatgggccaaattaaacgaataggttgggcttcttaactgcagcaggagcatgtccttaaggcacagatctctcatgctattgtttgtggcttaagaatggctttaagtggttttccaccctgggctggccaggtgttccttgccctcattcccgtaaacccacaaccttccagcatgggcgttagggccattatgaacctgttacactgctacagagattttgtttttggggggcttgctcccaacaagtttggccttcccacctctatacagtccgataacggaccagcctttattaggcaaatcacccaagcagtttctcaggctcttggtattcagaggaaccttcatactctttaccgtcctcaatcttcagaaaaggcagaatggactaatggtcttttaaaaacacaccttaccaagctcagccaccaacttaaaaaggactggacaatacttttaccactttcgcttctcagaattagggcctgtccttgaaatgctacggggtacagcccatttgagctcctgtgtgaatgctcctttttattaggccccagtatcattccagacaccagagcaacttggactgtgccccaaaaaacttgtcatccctatcttctatctagtcatactcctattcacccttgtcaactactcataaatgccctgctcttctttacactgccagtttacactgtttctccaagccatcacagctggtatctcctggtgctatccccaaaccaccactcttaactcttaaagtaaataaataatctttgctggcaaggctatgctgaacctccttaggcactctctaattggatgtcctgggtcctcccaattcttagtcttttaatacctgtttttctccttctcttattctgtttagtttttcaattcatacaaaaccatatccaggccatcaccaataattctatatgacaaatgtttcttctaccaaccccacaatatcaccccttaccacaaaatcttccttcagcttaatctctcccactctaggttcccacgccgcccctaatcctgctcaaagcagccctgagaaacatcgcccattctctttccataccacccccaaaaattttcgccgccccaagacttcaacactattttgttttattttttatttattataagaagacaggaatgtcaggcctctgagcccaagttaagccatcatatagcctgtgacctgcaggtacacatccagatggcctgaggtaactgaagaatcacaaaaggagtgaaaatggcctgttcctgccttaactgatgacattactttgtgaaattccttctcctggctcagcctggctcaaaagctcccccactgagcactttgtgacccccggccctgccctcaagagaacaaccccctttgactgtaattttcctttatgtacccaaatcctataaaacagccccacccctatcactctcgctgattctctttttggactcagcctgcctgcacccaggtgaaataaacagacttgttgatcacacaaagcctgtttggtggtctcttctcacagacgggagtgaaatttactgcagaatatttcccaaagtctcataatgatgcagaaatacatgtgtacaagacttgttctgacacctggcacagaactgacagtagtggctccccagggaggctggaaggagggtggaggacgtgacagggaagtgacagggaaaggagatgctttatggacaagggcctaagctgcagctttgcttggagcgttaccacaaaacaaatacatacatcatgtgatgtttaaatatcacaatatatatttaataataattggtggggctgagcacggtggctcgtgcctgtaatctcagcactctatgaggctgaagcaggcagatcacctgaggacaggagttcaagaccagcctggaatcccagcacttagaaaggcaaaggcgggcggatcacgaggttaggaaatccagacagtcctggctaacaaggtgaaattctgtctctactgaaaataccaaaaaattatccgggcgttgtggcactcaactgtagtctcacctactcgggagcctgaggtaggagaatcgcttgaacctgggaggcagaggttgcagtgagtcgagatcacgccactgcactccagcttggctacagagcaagactccatctcaaaaaaaaaaaaattaaccagccatggtggtacgcacctgtggtcccagctacttgggaggctgaggcttggggatggcttgagcctgaaggaggttgcagtgagctaagatcatgccactgcgctccagcctaagcaacacagcgagaccttctctcaaaataaaatcaaatatatgaaaacagaataactcaaagtacgaaaatccattttgtttatataggtccgcaaaataataaaacctacacagactcacaagaaactagatgttaacaaaaaaagttgtcattttccccagattttcttttctttcttttttttttttagacagggtctcgttctgtcgcccaggctgcagtgcggtaatgcaatcttggctcactgcaacctctgccttctgggttcaagtggttctcctgcctcagccagagtagctgggattaccggtgcccaccaccatgcccggctaacttctgtatttttagtaaagatggggtttcaccatgttggccaggcttgttgtgaactcctgacctcaggtgatccacccacctcggcctcccaaagtgataggattacaggcatgagccaccatgcccagcagattttcaaaatatatacatatgtgtgtgtaaatatgcatgtatatgtatgtgcatgtgtatgtgtgtgtgtgtatatatgtatatatatatatatatatatatataaagattttaaaaatataaaaagtaacaagatttgtttaactgaagaggaatctcatcttgctagaaaatgacactttggcagttgggggtaggggggaatcttgtcagatctaagaaaacaggaaatgccccatgctagaagaagcaatcaccctttcaactgactgacctggaggaagcttcagatatctgtagtaatgcaggcatgtggagaggcagccactatggcactccttatacaaggaaaaatctcaaaggatccacatgttgtcattcagccaatttccaaagcagatgtcaaagagcaagctagccatgtttactaacttgacaacatgtaaattttcgcaactagcaggatcaaatatcaaagtaaaatatttactaaaacacaaagaagaaaacaacagacgctggggtctacttgagggtagagagtgggaggaaggagaagactagaaaaaatagctattgggggctgggcacagtggcttacacctgtaatcccagcactttgagaggctgagaggcttcgatcatctgacatcaggagttcaacatcagcctggccaacatggtgaaaccctgcctctactaaaaatacaaaaattagccaggtgtggtggtggcatgtgtttgtaatcccagctactcgggaggctgaggcaggagacttgcttgaacccaggaggctgaggttgcagtgagccgagatcatgccatcacactcgagcctgaataaacaagtgcaaaacttagtgtcaaaaaaagaaaaaagaaaaaaaaaactattgggtactgggcttgatactggagcaatagaataatctgtacaacaaacctcaatgacatgagtttgcctatgtaacaaaccatcacatgtagccccaatcctaaagtaaaaacataaatataaaacgttttatttttttaatttactacagaattatttttaaagtctcataatgatgcagaaatacacgtgtatgagacttgctttgacacctaacacagaattgccagtagcggctccccagtgaggttggaaggagggtggaggacgtgacagggaaaggagatactttatggcaaagggtctaagctgcagctttgctcggggttttactagaaaacaaatatatccatcacgtgatgtttaaatatcaaaatatctatttaataataattggtggggctgagcacagtggcttgtgcctgtaatcccagcactctgggaggctgaggtgggcagataacctgaggtgaggagtttgaggccaccctggccaacatgatgaaaccccacctctactaaaaatacaaaaaaattaaccgggcctggaggcacatacctgtaaccccagctacttgggaggctgaggcaggagaatcacttgaacctgggaggcgcaggttgcagtaaactgagatcatggcactgcactccagcctgggtgacagaggctgactccatctcaaaaaataaattgtaaccatttttaccgaaaacacctgtttcacaagcctctccacagtaaccccacagtctccatgagcttaatgtgctaagaatggtttaatgaatctcctgctattatttaggttgatttcctattcttaaactaatgatggaataaaacaccttctatcattcatgtctgtgtatgaactttccattctaattagtacaatttttggagtcagaaacacagtaattcactaaattacctaaaaatgtagtataaaatcagggagaaaagattttttcttattggtctccttttctagaatttagacctactttgtgcacattaatacgtgacttccattggcagctgctctaatcctggtccacagagagatgacagagcatccagatgtggcccctgaacaatccctgctgcccaacagcactgacaccatgggaccctcactccgtctccatccatgtctgggtgtgagcccttcccaggaccatgcccagtgcagcctctcctatgttcatgtcactggatcatgaaagataaaatctaagccagataagagggaatgagggaaggcatgggtgagtgtgagcaaacctgtcaggaaggatgcttcagactcagagaagactcccaactccaaggcccagcgttactcaaaggaaggagacagaacaatccaccgagaatatcatctcacctgaggaagagccatccctgactcctttgctttcctcttcctcttctgggtttcttcctcacgtaccaaaagtctttagaagtcaatcctgaatgttaaaaatatgttatttattgctcagaatcaacacatgccctccctgtaacacaatcacacaaagtgtaatgcacgtccgtgtgaagagaccgccaaacacaatttgtttaaataatgaggctgtttatttcacctgggtgcagccgggctgagtctggaaagagagtcagcaaagtgtggtgggattatcattagttctcataggttttgggacaggcggtggagttaggagcaatgttttgcgggcagggggtggatctcaccaagtacattctcaagggtggggagaattacaaagaaccttctgaagggtgggggagattacaaagaacctttttaagagtgagggagattacaaagtactttgatcagtcagggtggggcagaaacaaatcacaatggtggaatgtcatcagttaaggccattttcacttcttttgtggatcttcagttgcttcaggccatctggatatatacgtgcaggtcacaggggatatgatggcttagcttgggctcagaggcctaactaaagacctcaccctgaggaaatagtccccccttctgccctcctaaccatggatgataaactcctacagggaaactcccgctccccttctggaggagtccacacacaagctgcagcagtggggagctgggctggaatgagctccccttcagggcacagacccagccctgaccgaaccccacgcagaggctgggtgcggtggctcatgcctgtcatcccagcactctcggaggccaaggcgggtagatcacttgagctcaggagtttgagaccagcctgggcaacatggtgaaaccccatctctaccaaaaatacaaaacttagccaggtatggtggtgcatgtctgtgtgtctgtggtcccagctacttagaaggctgaggtgggaggatcacttgacctgaggagtttgagagcagcctggccaacatggtgaaaccctgtatctactaaaaatacaaaaatgggccgggcgtgtgggtcatccggtaatcctagcactctggaaggccgaggtgtgctgattacttgaggtcaggagatcgagaccagcctggccaacatggtgaaaccctgtctctactaaatacacaaaaagtagccgggcttggtaagtgtctgtaatcctcactacttgggagacagaggtaggagaatcgcttgaacccgggaggtggaggttgcagtgagccgagattgtgccactacagtccagtcttggtgacagacaaagactcaaaaataaaagaaaataaaagtaaaaatacaaaaattagccaggtgtggtggcagacacctgtaatctcagctacttcggaggctgaggcacaagaattgcttgaacctaggagacagaggttgcagtgatccaagatcacgagactgcgctcacagcctggacgatagagtgactcagtctcaggaaaaaaaaaaaaaaaaaaaagcgcatttctgatgtgattgatgcagagataataaaacctgagtaacatgatgcagactgatgggcagagggaacttcagacgggggtgggagggcatgggagacagctctgagcctagatctggaggagaaatggacagggtacatagggtaagagcagggacaatgacagggttttgatgtttgggaaaagagaaaagcaaatgtgactggggcaaagggattcatgagatgagggcaagctcccaggaggaggctggacactggcaggggccctggacacagggctgtggagccacagtgaggggttgggcttttgtcctggggaacacgggaagccggtggagggttccctgccagggattgacgtgacctgctttagatttcgctgtgatatcctcatacagagaaaggccccgaagatggtctctgtgtctgagtctacctctgtttcttccattcttctgcttttgttttttattttgagggcactgcatcccattgaaaattctaatcacaactgggcactcctctcctcaaaaaaataaaaaaaaaaaagccacacccagacacgcactccattttgccaatcatttcaggggccagggtcactcgggttgagcttttctggtctagtccctcgtcgccaagttgcagggaggctcactggggctcagatcggaagacattttcaccaagttaccctacgaatgtctgagaggagtgagaaggtgtgcctgaattcttacatgggggcctggaggggctaataggaagggttggtcttatcatcctcatcctggaaaattagagaagcctctttcacaaacctgggctaaagaaacttcttttgcaaggttctgatgccattgattcctgacagttaattcttccttacaggaaaatcacaggaatatttataaaatgcagaagtgtgaacacacagctattgaccttgaaaacagggaaagaaggtcaactgtagcactaagaaataagcaaattgtttcaatcaagaatacatgagtggtcaggcatggtggctcacgcctgtaatcctagcacttttgggaggtcgaggtgggcagatcacctgaagtcaggagttcgagaccagtctggtcaacatggtgaaaccctgtctctactaaaaatgcaaaaaattagccaggagtggtggaaggcacctgtaatcccaactacttacttggtaggctgaggcaggagaatcgcttgaacccgggaggcagatgctgtagtgacacgagatcgcaccattgcagtccagcctgagcaacaagagcaaaactccatctcaaaaaagaaaaagaaaaagaaaaaaaaaacagaggccaggcggggtggctcatgtctgtaatcacagcacattgggaggccgagtcgggcggatcacaaggtcaagagttagagaccagcctgacaaacatggtgaaaccctgtctctactaaaaatacaaaaattagccaggcatgttggtgggtgcctgtaattctagctactcaggagactgaggcaggagaatcacttgatcccgggaggcagaggttgcagtaagctgagatcacaccactgccctccatccaaggcgacagagcaagactccatttcaggaaaaaaaaagaaaaagaatacatgggtgcttttggaggagagttccatgccaatccagcccatgtttcaacatttttccagaatggaccagagggccttgagggaaacacgcaataaatagctcccagctcaagattttaacaaatgacataaggaaagaaaactgaaaaacagactaactggttaaactacattttgatgtttagttaaaaggtcactgacatctataccaagtacacactgaaacaatcaaacttaagtattgggtatgaaacgcttccaataaataacaaagaccagaaagcatgcagacttcgatctgaactggatgcaactaatttcaaacagcaactattttttttaatctaatgaattctggggtcaactggaaaagaacaggagaatatacaagtacagaaatgaatgatgtgagctgactatacgatgctgcaaaggcatctttcagatgtgattatatactatgaaagaaatacaatttttaaaactaagatttatctcaaactcaaactgcaaaaaaaaaaaaaagagagaaatgaagaggaatcagaaaggaaaaaaaaggaagtctattgaacaatgagaacaaaagcatttttaatgtttttttttaatattttttgtttgctggtttctttgagatggagactgactctactgcccaggctgagggcagtggcacgattttgcctcacggcaacctctacctcccaggtttaagcgactcttgtgcctcagcctctcaagtagctggaactaaaggtgcacaccaccaccccccggctaacttttgtatttttagtagagatggggtttcaccatgttagccagggtgctcttgaacttctgaccttaggtgatccactcacatcagtctaccaaagtgttgtgattgcagggatgagccaccatccagctttgatatcctttttttttttttttttttgagacagattctcactgtcgcccaggccggagtgcagtggcacgatgttggctccctgcaagctccgtctccaggattcacaccattctcctgcctcagcctcccaagcagctaggactacaggcacctgccaccacgcctggctaatattttatatttttagtagagatggggtttcaccgtgttagccaggacggtctcgatctcctgaccttgtcatgggcccgtctcggcctcccaaagtgctgggattacttacatgagcctccgtgcctggcctgatctcccttttataaagtactatatcaaaaaagtactatctctttaaaaagtactatctcaaaaaagaaaaatagaaaataagaatcaaaaaacaggctgggaaaagtggctgacatctgttggccatgctggtttcaaacttctgacctcaagtgacctatgtgccttggcctccaaccgtgctggaattacaggtgtgagaaaccacacctggcccaatcctcttaacataaacacttgaatgtcaattaagggttgaactcaatgttaagtcaacacaaactcaagtcaatgctggactgactctagtgtcaattaatgcttgatggtttgctatactcactgcattgggaacagttatctcaaaaatgaattttctgatgttctgcaaggagtgacctcggactcaagaccttgccacacttctgacatttgtaagatttctgtccagtagggattctctgatgtctaatgaggtgtgaacatgaagtaaaggctttgccacaatcatcacacatgtgaggtttctctcctgtatgaattctcctatgttttgcataggatgaagcttgactgaagaccttgccacagtcatgacatttgtaaggtttctctccagtatgagtgtgtcaatgaactgcaatgtatgaatgatgtctgaaaaatttgccacatttattacacttgttagatctttattcattatagattctccaatgatttgcaatggttgtagcgttactgaagactttgtgacaatcattacattagtcaagtttccctacaccatgaactgcctgatggtgaataagtgttgactgcttgctaaaggctttgccacactcattacacttgtaaggtttctctccagtgtgaagtccagtatgttgtttcaggtgtgaatcactcccaaaagtcttgtcacaaaccttacatttgtatggtttctttccaggatgaattctcctatgtcttttaaggtgtgatttgcgactgaaaactttgtcacatgtttcacatttgtaaagtttctccccagcatgaattctatgatgaagtgaaagttgtgattgttgattaaaagccttcccacattcattacacttgtaaggtttctctgcagtgtgaattctggtatgtcttgccaggtatgaattacgcacgaaagccttgtcacaaaccgtacatttgtaagatttctctccagtatgaagtctacgatggtgaacaagggatggcttgtgactgaaggtcttgccacactcattacacttgtaaggtttctcaccactatgaagtctacgatggcaatgaaggtatgacctctgactgaaggtcttgctgcactcattacacttgtaaggtttctcaccactatgaactctgcgatggcttgcaaggtatgacctcagacggaaggtcttgctgcactcattacacttgtaaggtttctctccactatgaattctagtatgttttgccagataggaatgacacgcaaaagccttgtcacaaaccttacatttgtatggtttctctccggtgtgaattatcttatgtgtctcaagggttgatccacaactgaaaaccttttcacattcttcatatttgtaaggttgctctccagtatgaattgacttatgaattagaagatctgaattttgaccaaaggtcttcccacattcattacacttgtaaggttttcctccactatgaattctagtatgtcttaccaggtgtgaattccacgcaaaagccttgtcacagaccttacatttgtaagatttctctccaccatgaagtctatgatggcatacaagggatgacttgtgactgaaggtcttgccacactcattacacttgtaagttttctctccagtgtgaattcttttatgtcttgccagctgagaattccatgtgaaagctgtgtcacaaaccttacatttgtatggtttctctccagtatgaattctcttatgtgactcaagggttgatttccgactgaaaactttgtcacattcttcacatttgtaaggtttctctccagtatgaattctacgatgacgtgcaaggtttgattgctgattaaaagctttgtcacattcattacacttgtaaggtttttctccagtatgaattgccttatgaattacaagggctgaattttgaccaaagatcttgccacactcattacacttgtgagattttactgcagtgtgaagtctacgatggcatgtaagggatgatacctgactgaaggactttccacactcattacacttgtaaggtttctctccagtgtgacatctacaatggcatgtaaggtattgcttgtgattaaagagcttgccacatacatcacatttatattgtttgtctcctaaatggggtatctggtgtttccttaagagtgagctacaattaaaggctttgccactctcattacattggaaagatttttctctcatgtatacttcctgtttttgtgggagtagtgaagaattcggggaattattcccatagttattagaaatatggatttggggcctaggagaaattctttgggatgttgaaaccgagggagcatcactggtagacttctcaaattgattaccaattttacctttgatctgaattatgtggagttcaggcagatgtgaataaaagcttgatccaagctgatctttaataggcttgtttccagcatgcctgtgatcatgttggtctgtgctaccagtcaacttttttatttttgtcatgggtgcttcatggccatttctttcatcttcttgacactgaaactcaatatcatgaatttctttctcaatttcctggaagcaaaaatctccaatgtgataactttgatatctttgcaatgtccctgtgtggatcacttctgtattgccttgccctgttgacaagacctccttcatcatgcgtttggaagagatatctacaaaatataaacaacaataggtttccaattaagtacagatggtaaatcatactgaagtgtgtaaatatgacacaaaaaacaatacttattttgaacttcccaaatatcatcttcaaagtttaggaacacaaaaggagtaagattctttaataaacaaggggcaattacatgtccttcaaatcaattctatgaaagtctatttcctatgtcatcacaaaacactgacagggcacaaacgtgtaagcctaaggtaaggagtatttttccactgtgaccctaaagtgtatcacaatttgcaaaaaacatatcactgtcacatcaatgaagagaaaaatatatatttttcatatttaaaccatatttactgtgtacaaatgctaaaaaaaaaacaaagaaacccacacaatatactatattggtaaataatccacaaactcatgtaaggataaccaaaatcaatggaaattctgtattttcaaacaattatagcaccgagaagagaagattacaaaaattaaccaggtgtgctggcccgtgcctgacagtcacagcaacttgggaggctgaggcataagaatcacctgaacctgggaggcagaggttgcggtgaggcaagattgcacctctgcactccagcctgggtgacaaagtgagactccacctcaaaaaaaaaaaaaaagcaaaaaaaaagttaattcaatatttttctcaataaatgtcataaaattacctatatccacacaggacaggcacttaatgacttttcaaaaaatttttgtatttttatttttttgagatggagtcttgcactccagcttggagtgccatggcatgatctcagctcactgcaacctctgcctcctgggttgaagtgatcctcctgcctcatcctcctgagtacctggggttacaggcatgcacaactatgcctgggtaatttttgtgtttttagtagagatgtgtgggcagcaagccaactaggtgccaaggcaagagttcgagggcacaagctgttccaatataataaaatatataaaataacaagagttatactagatctagatcatagacatgattatatatgaatgtcattaatcattagttggtagcaattactctttattccaatattataataatcctcgctctataatcataacctaagaaaagccaggccatacagagataggagctgaggggacacagtgagaagtgaccagaagacaagagtgcgagccttctgttatgcccagacagggccaccagaggactccttggtctggcagtgatgccagcgtctgggaagatgcccgttgccaagcggaccatggtctagtggtagcatcagtgccaaggaacaacacccgccacttagcagaccgggaaagggagtctccctttccccgggggagtttagagaacactctcctccaccacctcttgcggagggcctgacatcagtcaggcccacctgcagttatccggaggcctaaccgtctccctgtgatgctgtgcttcagtggtcacgctcctagtccaccttcgtgttccgtcctgtacacctggctctgccttctagataacagtagcaaaatgagtgaaagtactaaaagtgtctgatatgcagaaataatggcgcaagctatctctctctctccctctctctgcctcggctgccaggaagggaagggccccctgtctagtggacaggtgacccacgtgaccttacctatcactggagatggctcacactccttaccctgcccctttgtcttgtatccaataaatatcagcgcagcctggcattcagggccactacccatctctgcatcttgctggcagtggtcccccgggcccagctgtcttttcttttatctctttgtcttgtgtatttatttctacagtctctcatctccgcatagagagagcaaaacccaccgaccctgtggggctggtccctacagagatggggtttcaccaggttgaccaggctggtctcaaactcctgacctcaagtaatcttcccgcctcagcctcccaaagttctgggattacaggtgtgagccactgtacctggtggcactttgtgacattaatgagtggagtgtggcagttatattgcataccacataccgaaaagccatatgcaaaattataaaaattaattaataaaatattgtaacccatgataaaaccagcaagcaagtaagtacatttatacagcctgcagaattctaaacaattccctcttaagaaaaaagccacaacatctacttaaccaccagcacacaatataagaactgaaatacatgttaagatcactaccttctcatgtatgaggtcaagaaaatacacagcattttaagaaataagaattgactaatggctggtaacggtggctgacacctgtaatcccagtactttgggaggtggagacatgtggagcacgaggtcaggagttcgagaacagcctggccaacatggggaaaccccatctctactaagaatacaaaaaaaacagctgggtatggtggcagacacctgtaatctcagctactctggaggctgaagcaaaagaatcatttgaacccaggaggcaaaggttacagtgagccgagattgtgccattgcactccagcctggttgacagggctagactccatctcaaataaataaataaataattgactaatagtgtagaaaagtacaattatgatgtcacaactacacttatgtaacagccaggcaatacagcaattttacatttgtgcattccccatagttatctagttcactatgcgtaagatataaaacatagaatgtgtactgggaaaatttataaacagatcagagaaaatattgtataaaacaaattgcacaataagaacaaaaaatatgatgtatgttccctggcccgaatgttcaccttggctaaaagtcattatcagatttcttattctccaataaggatgttcctgcagttggggtcttttagagaatttggtcatgggtgttgactaattgtgaataggactagggcttttaattgtattttttctttctttatctacttttgagacagagtttcgctcttgttgcccaggctggagtgcaatagcatgatctaggttcaccacagtctctacctcccaggttcaagcgattctcctgcctcagccacccgagtagctgggattacaggcatgtgcaatcatgcctggctcattttgtatttttagtagagacatggtttctccatgttggtcaggctcgtttcaatctcccgacctcatgtgatttggccgtcttagcctcccaaagtgctgggattacaggtgtaagccaccacgactggccaggactactgtttttataaaaagagacagtaaagagctcattgcctgctcctctttcccccatgtcaggacactgcaggaaggtggctgggctaaaccacgaagaaggctctcaccaggagccaatctagctgacatcttgttcttggatttcccattttccagattcatgagaaataaatttctatgtcttaagctttcaagtttcagctatttctttttttttgtctgtcatgcttcatcacccaggctggagtgcagtggcacgactctcctacctaaagagattctcatgcctcagcctcttgagtagctggcactacagatacatgccaccatgcctggctaattttttttttggaaacagagtctcactctgtcacccgggctggagtgcagtggcgcaatcatggctcactgcaacatccatctcccaggttcaaatgattctcctataggtctcagcctcacaagaagctgggattacaggtgtataccaacacacccagctaatttttgtatttttaccagagatggggtttcaccatgttggccaggctggtcttgaaattctgacctgaggtgatccacccgtctttgcctcccaaatttttgggattatagtcgtgagccatcacgcccgtccaattttttttaatttagtagattcaaggtttcattatgtttgcccgactgctctcaaactcctgacctcaagccatctacccacctcagcctttcaaagtgctggaattagaggcctaagccactgcggctggccagtctaagctatttctgacagaacagtgaaaagagtgagataggaaaagaggcatctcatcatcaacatcactgaaggctgacaaatcttattaaacaaaggaagttgagtgtgtactataaaacttatatgaagccatctaatagtattcacttgttttaaaaagcaggtggacgaatcacctgaggttgggagtttgagaccagcctgaccaatatggagaaaccccatgtctactaaaattacaaaaattagccagacttgcaccaggcataatcccagctacttgggaccctgaggctggacaatcacttgaacccaggaagtggaggttgcggtgagctgagattgaaccaatgtactccagcctgggcaagaagagggaaactccatttaaaaaacaaaaaaggccagacacagtggctcaggcctgtaatcctagctctttgggaggctcaggcaggtacatcacttgaggtcaggagttcgagaccagcctggccaacatggtgaaaccccatctctactaaaaatacaaaaattagccaggcgtggtggtgcatgcctgtaatcccagctacttgggaggctgcagaaggagaatcccttgaacccgggaggtggaggttgtggtgaactgagattgtgccattgcacttaagcctgggcaacaggagcaaaactccatctcaaaaaacaaacaaacaaaaaccaaaaaccaaccctggaggcaaattaacattatttctcaaataacaaaagcaggcccgcggtgttcatggacatgaccccagtttgcacgtacggtaagtgagggacaagacttgatcctgggcatgaaggatcccatgacatgttcttaggcacaatagtcagcccaggcaggacaggaaatgaccagacacagaaaatacaaggagaacagatagaagtacatcaagggggatacaaggactgagctgggacacaagcgctgagctgcgctgctgacagtggttctgaagccatccctcatggatcatgtgctgagtcatgatgccctgcacacactgatttaagcggcctcctataattttgtccagtggatgaacaaggtcttgacttactcagtgagagtagtgttggaggggaggggctcacggggaaattggggtgttcactattacaaagtcaataggctggtatttgcatccagatcaatgtatcatgtgaggcaaggccaggaaaggaagggcaagggtggagagcaggaagtaatgggcatgtaggagtgaactttgtgcatgcatgtctgtgggaatataattccactaggatagaccaaatcttgagcttggaagaaagtggaactaatttagcaaatggtaaaatattgacccaaggttaaatattcaaattacaatatgggcaagggacaagaatgaaagagatccaaaaaagcagcagtatggtggcctgaggtgaaagcaattttacatctcttaaattaaatgcctctgatttctagtttcaagcatatactcaacaataatcccctgtgtagattccagaaatgtgtacacacaaaaaaataagtaaaccctatgaagagtacagtagagcaatgtaggagaccatggggttgaagaaggatgccctggctgagtaggtagagatgtgtttgtgaaaacagagccaggctgagtgcagtggctcacgtctgtaatctcagctcattaggaggatggatgggtggatcacaaggtcaggagttcgagaccagccaggccagcatggtgaaacactgtctctactgaaaaaatataaaatattagcccggcatggtggtgcatgtctgtaatcccagctactcagaaggctgaggtaggagattgcttgaacctgggaggtggaggttgcagtgagctgagattgcaccactgcactccagcctgtgtgacagagcaatactccatctaaaaaaaaaaagaagaaactataactttaatagaaatgtggtttcaccatgttggccaggctggtcttgaactcctgacctcaggtgattcacccacctcagccttccaaagtgctgggattacaggcgtgtgccactacacccagcctggcagcattatttataatagtaaagagaagaaaccaacccagatgtccatcaacagataaatatatgaacaaaatgtggtatacacatacaatggaatattattcagccttaaaaacaaacttggatgggtccaggggctgtggctcatgcctgtaatcccagcacattgggaggccgaggtgggtggatcacgtaaggtgaggagtgagagacgagtctgaccaacatagagaaaccccgtctctactgaaaatacaaaattagctgggtgtggtggcacatgcctgtaatcccagctacccaggaggctgaggcaggagaattgcttgaacctgggaggcagaggttgcggtgagccaagatcataccattgctctccagcctgggtaacaagagcgaagatccatctcaaacaaaaaaacaaaacaaaaaaacaaccaaaaaaaaaaaaaaagccatgcatggggcaaaatcacaaaagagaacacaaaaccaggaagggccaagatagacaagagcagactcctcatgtctgggggacatcattttcctcacccacagcttccaggttcctgtagttctccaacatcacttccctgtacaaagccctctgcgaagggttcaggcatttccactctgccaatgagaattctatagccacatccctgaaagtcaagcgtccctaaaatgaaacacacatttccacaaaacattatggaggattgagttatcaccttcatgggaaatgagaaaagagaaaataagtatttgatcaaagactgtgttctgacaaaatgttaaggtattttgaatattttttccctatagttgcattttattgtacttttctttgaaagattttaagatgccataagtcactatggaagtctcaatttcatagacaacataaaaagtataaaaataaaaaggaaacacagggccaggcatggtggttcacacctgtaatcctaacacttcgggaggccaaggcgggcagattatttgatgtcaagagttcgagaccaccctggccaacatggtgaaaacctgtctctactaaaaatataaaaatttgtcaggcatggtggcaggcacctgtaatcccagctacacaggaggctgaggcaggagaatcacttgaacccaggagatggaggctacagtgagccaagatcgcaccactgcactccatcctgggcaacagactgacactccatctcaaaaaacaaaacaaaacaaaacaaaaaaacaatgccgggcagtgactgtcacctgtaatcccagcactttgggagaccaagacgggcagataatgtggtcaagagattgagaccatcctggtcaacatggcaaaaccatgtctctactaaaaatacaaaaattagctgggtgtcgtggtgcaggcctgtactcccagctactcaagaggctgaggcaggaggatcgcatgaatccgagaggtggaggttacagtgagccaagatcgcaccactgcactttagcctggcaacagagcaagactccatctcaaaaacaaacaaacaaacaaacaaacacagggttttttctacagacatgtcagatattatgttcaacataccaggtgatattaagtctctagatgagctaagatacaagtggtgtttcagagaggacaaaatccaacggctttgaatgaaaagtctgaatctaaaaactgtcatgactgcgcaggcacagtggctcatgcctgtaattccagtactttgagaggtcgaggcaggtggatcacgaggtcaggagtttgagaccagcttgggaacatgctgaaaccccttctctactaaaaatacaaaaattagctgggagtgatggtgggtgcctgtaatccccaatactcgggaggctgaggctggagaattgcttgaaactgggaggtggaggatgcagtgtgccaatatcatgccactgtacttcagcctgggtgacagagcaatactctgactccaaaaaaaaaaaccaaaaaccaaaaactgttatgatgacagcaatagccatgactaacatttttgaatgcttcccactgttctaagtgcttcccatgtcttaagccataaaataacatactgtcccatgaagaaaggtctgtacttggagacaagtgcatcacacatactaggaaaattaccacaaatcaaatagctaaaaatgtcaacacaagcactgaatccagatgtctgggattcacatttgaatataaacgctgaagtaacagatacagctttaaactaaactgacatgggtttatctagtggagagaatgtgacaaaggtccaagggtaagaacacggagcatcctacaaggtcgctgaatggacacacacaggcatacatataatccttcccaatacttcttactttttttttttttgagatggagtctcactctattgcacaggctagagtgcagtggcagaatctcagctcactgcaacctcggccacccaggttcaagcaattctcttgcctcagcctccccaggagctgggatttgaggcacctgccactgcgtccatctaatttttgtatatttagcagagacagggtttcaccatcttagccaggctggtctcgaactcctgacatcgtgatctacctgcctcagccttccaaatgaaaaatagttaaaatcattacaattattataaaaaataaaacttattgcaaatgaaaaatacttaaaatcattacaattattataaaaaataacttattgcaaatgttgtgttttctacataaaccatgggcttatccacccatgtattcatgcacacacatcacatcacggcgttacccacgtggtggcccacctctaatccaagctactggagaggctgaggcaacagaatcactgtaatctgggagtcagaggctacagtgaaacaaaatcaccccactgcactcctgcctggacaacagagactcaactcaaaacaaattaaaaaataaagtaaaatcaatgatgtaagaaagcatcctgtaccactgatgcctatctccactttccactccatcccaagtcattaaaagtgcagagtttggctaagcgtggtggctcaggcctgtaatcccagcactatgggaggctgaggtggatgaatcacaaggtcaggagttcgaccagcctgaccaatacggtgaaaccccatctctactaaaaatacaaaaaattaaacaggcgaggcagcaaatgcctgtaatcccagatactcgggaggctgaggcaaaagaattgcttgaagccagaaggcagaggggcagggagctgagatcccaccactgcaatccaacctgggcaacggagcgagactccatctctaaaaagtaaagagtccagctgggctggctgtctcccatctggaatgccagcaatttgggaggccaaggtgggaggatcactggaggccaggatatcaaggctatagtgagctatgattgcaccactgcactccagcctggacaacaaaataaaaatacgatataaaaaataaggccggacacagtggtgcacacctttaatcccagcactttgggagtccaagacaggcagatcatgaggtcaggagttcgagaccagcctaaccaacatggtgaaaccccgtctcaaataaaaatacaaaaattagctgggtgtggtggtgcatcctgaagtcccagcaactcaggaggctgaggcagaagaattgcttgaaactgggagatggaggttgcagtgagccgagatcattccattgcactccacctttggggactgagcgagactccatcttaaaataagtaaataaatagatagagagatacatatatacatacatacggtgacccatgcctatcactcaggctctttgggaggctaaagcagggattagttgagctcaggagtttgaggctgctgtaaactctgaattgtaccattgtactccagaactaagccacagagcgacaccttctccctctctctctcttttcttttgagacagagtctcactctgtctcccaggctggagtgcagtggcataatttcggcatacagtaacctccacgtcctgggtttaagtgattatcctgcctcagcctcctgagtagatgagattacaggcatgcaccaccaccccaagctaatttttgtacttttagtagaggtggggtttcaccatgttggccaggctggtctcgaactcttgacctcaagtggtcttcctgccttggcctcacaaattgctggtattacaggtgtgagcacctgaaccaacatcctgtctcttaaaaaaaaaaaaagtttggaatcacagacatcttgatctactagtgtggcttcaaatgcattaccaaatcagatacaaaatacctccccttatttgtctccttttccagaatttactagatatctgtgtacactaacatatgtatttcatatgtagtttctctgatctggtccacaaagagctgacatccagatgtggcccctgaacaatccagcctgcccagcagcactgacatcaatgggcccacaccccatgtttatccatgtctaggtgtgagcccttcccaggaccatgcccagtggagcttcttcccaagttcacatcactgggtcacaggagatggaatctcggagcagctgagaggaactaagggcaggcatggctgagtgtgagtgaacgtgtcaggcaaaattcttcaaactcagaaaagactggctgctacaatacctggcatttcagaaaggaaagagacagattaatccacagaggaatatcacttcacctgaggaagagccatgcctggctcctttcctttcctcttctgagctgcttcttcacataacatgagtctttaggaatcaatcctgtatgtgaaaaaaaatgagacttcttgttagaaatgactcactcccatcctgtgacaaaaccacatgaacaggggagacctcacccagcagaaagaagtcccccaccgcccactgcaccagagatcatgcagagataagaaagtcccacaggacgacctataagtgtgtttgaccccggtcttcagatctcactcccctcctggagaagcccccacacactaggcagcagtggggagctgggctggactgatctccccttcagggcacaaacccatccttcatcaatccccatccagaggacagcccctcacctctctgtggatcacaggctgagctcagccctcagaaatggaggacaaagatgctcaatgctgcacacagatgacaagcacctgcgccactgcaggtattactgagggtgggttccatcccatcagaataagaatccctgctaaagcagcacaaaagctctatttgaaaaatgcctctagactctaatgtgaagccagggttgagctccactcagagggggcgagcccagcacagccccacgttctggctctgccctccccttggggccttgttctcaccagcatccagagagtggatgacaaaggcacaaaaataatcacacagaacaggcaacgtggaccagaggtggggtgaatgatgggctgtgtgaaaggaaataaatcttcgagccccaactcactaagcaaaagggagaagtcaagctgggaactgcttagtgagccagactccccttctattcaaagtcacccctctgctccctgacatagatgcatgtctgagtgcctccttcgaaagactaatcagaaactcaaaagaaggacccagcacagtggctcaggactgtaatcccagcactgtgggattacacaggtagatcacttggggtcaagaggtggacaccagccagccaacatggtgaaaccacatgtctactaaaaatacaaaactgatccgggcatctacttgggaagctcaggcaggagaatcacttgaacccaggaggcagaggttgcagtgagccaagactgtgccactgcactccagcctgggtgacaaaaggagacttcatctcaaaaaaaaggaaactcaaaagattgcaaccgtttgtgccacatttctctgtgacctggaagcccactccgtgcttcaagtcttcctgcctttgtttaaagttctcccaccttcccagaccaaatcaatgtacttcttacatatattgattgatgtctcatgtctccataaaatgtataaaattaaactctgcgccgaccaccctgggcaaaataaactttctaaattaactgagatctctgtaagattttctggtttcacagctgcagtgtcaaatgagggctgtgggagatcacaaaggaaacccggagaagatgatatcagaacaaggacctaggaaagaaaggctgcttgtcacttgcagctgaggggaagagagtcctagagagagggacagctcaagtgagggccctgagacaggagcaacctcagccccaggaagaggaaagcgaccagtggggctggaacagtggaagagaggagggcacaggtaggagatgaggtcagagaggtcctgggggcacagacccataggaacatgtcttcaaacatgtttctcccacaaccttaaagaattttgaaagtcgactgtgatcccagctactcgggagtctgaggaaggagaatcccttgatcccaggagtcagaggttgcagtgagctgatatcatggcattgcactccagcctcagccacaagagtgaaaattcctctcaaaaaaacaaacaaacaaacaaaaattggaagtgatgtatcttctcactcttttcacgtatacatctaagtttctctttatattataaattacaacacttacaaataaagtaatttatttcacaaatttaaaatacatgctgtcaagttcggccgtttccggaagtacgtagtcaccctcatctgagatgtgcagactgcaaggaaatgtgtttgggggtttagaaagccactcgtggacacctgaaggtggggatgcctgtttgatgacccaggagacagctgaggagacaactggacacaggattgtagagctcaggggcgaggcctgcaggggacatggagtcatgtaggtgggttaaagctgtgagatgataaggttcaaggtgacttgagtctaattaccccgtttttgttcatcttgtgcttctttttttttttttttaatatttggagaactggaattcatttaaaattcgagttaaaactgagcactaccctctcccagaagaaaagtcacacactgtattttgtcagtcatttcaggggtcagtgtcactgactgagcttttccggtcttattcctcacctctatgttacaggtgggctcactgaggctcacagtgggagacatttcaccaagttattctgagatgttctgaggtgaggaggaaggacgtgtggctgattcccatgtgattgcctggaaggcccaataggctgccttggtcttcctcctctagaaaattccaagaccagccaggattggtggctcacccttgtaatcccagcactttgggtagttgaggcaggccgatcactggagccgagaagtttgagaccaacatgggcaacatataaaccccatctctaccaaaaatacaaaaaattagccaggcatcatggcatgcatctgcggtcccagctacctgggaggctgacgcaagatcacttgagcctgggaggcagaggttgcagtgatccaagattgttccactgcattccagcctaggtgatagggtgacactctatcttaaaaaaaaaaaaaacagcggtcaggcaaggtggctcacacctgtaatctcaacactttgggaggccgaagtgggtggatcacaaggccaggagctcgagaccaacctggccaatatggcaacatcccatctctactaaaaatacacaaattagccaggcgtaggggtgtatgcctgtaatcccagctattcaggatgctgaggcaggagaatcgcttgaccccgggaggcggagtttgcagtgagacgagatcgtgccactgcactccagcctgggtgacagagagtctcaataaataaatatatatatctaaacattagccaggcctcgtggggcgtgcctgtggtcccagctactccggaggctgaggtgggaaaatcacttgagcccaggaggttgccgctgcactgagctgtgatcctgccactgcactccagcctggacagcagtaagagtgtctcaaaaaaataaaaattaaaggctggacgcagcagctcatgcctgtaatcacagcaccttgggaagctgaggcgggaggatcacctgaggtcaggagttcaagaccagcctgaccaagatggagaaaccccgtttctactgaaaatacaaaattagccggccatggtggtgcgtgcctgtaatcataactactcaggaggctgaggcaggagaatcacttgaaccccagaggcgaagtttgtgatgagccaacatcacgccattgcacttcagcctgggcaacaagagcaaaactgcatccaaaaaaaaaaaaccgacaacagcaaaaataagtaaatttaaagtaaaattaaaaaataacaactaatgaggcccagtgtgatggctcacgcctgtaatcccaacacttcgggaggccgaggcgggtggattacgaggtcatgaattcaagaccagcctggccaagatggtgaaaccctgtctctactaaaaatacaaaaatcgacaggacaggtgtggtggcggctggctgtaatcccagctgctcgggaggctgagacagagcactgcttgaacccgagagccggaggttgcagtgagtaaagatcgctccactgcactccagcctgcatgacagagaaagactccatctcaaaaataaaaaataaataaataaataatcacacaaaaaaccaactaaactaatgaagagaggaactagaaaaaaaaattacaaaaagagaacaaaagcacttttaatattcctttcatcacgttccatatagtaacagagactcagtcacttcttactctacttctctccctcactccccaccccatccatgaaaagggaagagggtgatccacaaggaatgagtcaagtcactgtcctctggctgaagaggggttgcagagggaagctgcctctgacgccatcattataaaatgcaccacacttagacacaggagtttggcaactctcattctcatctgtataatttaaactaattttaaatttgttacattataaacagagaaaacaacatgtcatcacttcatcatcacatccaatcaactcaccactcatctgcacccagggtcccccttcgtcttcattacttttcccctccatcattcctttttttgtttgtttgttttgagaccgagtctcgctctgtcgcccaggctggagggcagtggcgcgatctcggctcactgcaagctccgcctcccgggttcatgtcattctcctgcctcagcctccggagcagccgggactacaggcgcccgccaccacgcccggctaatttttagttttcttagtagagacagggtttcaccgtgttagccaggacggtctcaatctcctgacctagtgatccgcccgcctcggcctcccaaagtgctgggattacaagcgtgagccactgcacctggcctcccttcggcattctatacatagctctttctcaccttctctctccatctgtttcttttctgcatttccccctggacttctgctcattttatgcccctctcctgttttgctccattcttttttgttttttgtttgtttgtttgttttttagacggagtttcgctcttgttgcccacgctgaagtccaatggtgcgatctcagctcaccacaacctctgcctcccgggttcaagtgattcttctgcctcagcctcctaatccaaaattagcagggcgtggtggcgcatgccagtaatcccagctactcgggggaagtatcacaagagaatcgcttcaaccctaaaggcagagatagtcattagccaagatcgtgccagtgcactccagcttgggcaaaaagagcaaaactccacctcaaaaaaaaataataataataattagtaggtaggcccggcatggcggctcatccctgtaatcccagtactttgcaaggccaagacaggaggaaactttgagcccaggatcttgagaccagcctgggaaacatactgaaaccctgtttctacaaaaaaacaaacaaacaaagaaaaaaaacaactagctgggcttggtgtctcacacctgtggtctcagctactagagagactgagggaggaggatcgcttgagcctaggaggtcgaggctgcagttagagtagagaacgctattgtaatccagcctgggtgacagagccagaccctgtctcaaaatataaactaattaataaattaaaagtattatgtaataagagaaagtgattttttttcccccacatcactgtcccacttcctaccccaccctgggaaaagggaagagactgactcacaactgaataactgggattccaagtagaagctaacctctgataccaaaatttatagaatgtacatgtctcatagacaggagttttaaaattctaaatctcatctgtataatttaaacaaggtattagatgatatacacagaagtcaacatgtcacaactaatcatatccaatgaactcacccacttatctgtacccaaagtcccccaccctttttttcttttgagacagggtcttgctcttttgaccaggctggagtacagtggcatgatctctgctcacagcagcctggagctcctgggctcaagtgatcctcctgcttcggcctagagaagctgaaactgcaggtgcacactatcacacccggttaaattttttttttccttttttgacagagatggggggagcctcactattttgcccaggctggtcttgaactcctagactcaagcaatccctttgcctcagtctcctaaagtgctgagattacaggcatgagccactgcgcccagcccctctttcttcattactgtgcttccctccctaattctgtgcatatctctcattctccccttctctctctagctcttgttttcttttctttttccctgggattgtgctcctcattttgtacccctctcctctcctgctgtttatccccttcttccctctattacttctcttccacctcttctgctccattctcacagcttatttaacctcttttttttttttcctttttgagatggagtttcactcttgttgtgcaggctggagtgcaccggtgcgatcttggctctcaccgcaacctctgcctcccaggttcaaaggtttctcctgcctcagcctccctagtagctgggattacaggcatgtgcaaccgctcccagctaattttatatttttaatagagacggggtttctccctgttgatcaggctggtctcgaactccggacctcaggtgatccacccgcctcagcctcccaaaatgctgggattacaggcatgacccacagcgcccggtccttatttaacctcttgttgttctttctccccaatctttcaatcttcctcaatgtctatatattacagcctcttctcttatctctccgtctcctctgctctccctattaaattctctcttccctgttatacccctctgtccccactctccagcacctcagatccccaggtgtcctccctgctgtggttctccatctgttcttgccaccagcaccactctgctctgtctgccctggctccaaatccctcctcctctccctcactctggtgagcctccctctttgctgcccctctccctaccttgctgtccttcatctttctgtacatctagcttttctctacatttctccagttgcttttctcctcctgctttcttagttttttttctttcacttttgctgtctcttggcaaattcctaacccatcctctactttgccatctgttatgggcctttctcattcttcttttctctgtctctggttttctactgctctctcagtccctctctctatctcctgatccctttggcccaggcgggtttggagtaatcacaggcgggtttggagtaagacgcctgcatcccgtagaagcgcattttccagggggtggagctggacaggaaagaacacctggtatcataggacaagcccctgcgacccaccccaaccctggctcaggggaagcgaagacttggggagcagcagggcccggcaccaggagggacgtggtgggcgacggcaccctaagacaaaggtgggacctgcaggatcccaggaccaggcagaggacgcagcctccccggggctggggccggggcgccgcgctccaggtgccaactggggcgaggctgggaggcgcccagggctggaatccacctcgcgggtgaggactttaaaaagcacggggcgggaatagtcagaaaaatgttttgagcaggaaaaatacgcgataggaagtgtatacattgccctatagcagaaagaccggggacgggaccagcctccgagcgacttcaaacccaaaagcaagcaacttccagactcttaccgggacgtctcaatttgctctgggtgaagggaagacaggcgagaatttccaggtccgtggggatcccacgtcccaggggcagaagcgccggggacctgggaagtgcagacttaatccaaggcagagcaaaactcacgcgccgtggtaggaccttcactccacgcgatccgcttccgggtttgtgcgcgcccaggactgaagccaggccggggcaggttggctggacctgggcggggtagaggcggggccccaggcggagagaccttgccctttagaaccggcagagggagggcccggggcgggacctgtgcttctcagcctcgcactcagcgcctctgtttttcgagtttttggaggcgacagcggccaggaaggctgaggcatgattcaaaagccctggaattatctggaacgggaatgcaaactagaatgtgaaatgcaaagccctgccagggcggaacatacgatttcatgctgatggcccacagaacagaacagaaatcctctccctttctattctccattcactcaggagggagggtccaccccgtgctcagcttcaaagtgttccctagggcctccgcctgggatgcgggacggagagctcaggccagggaggagtgaggtcaccacctgctgcctaaacacagcagggatgcgggcacgaggcggaagcctgaggtcccagctactcaggaagcagcggcgggagaatccctgaacctgggggtccaggccatcctgggcgacaaagtaacaccccctaactgcagggtcctcttcctgatctctctctcgctcttttactttttttttttttttttttttttgagacggagtctcgctgtgtcgcccaggctggagtgcagtggcacgattttggctcactgcaagctccgcctcccgggttcacgcccttctcctgcctcagcctttcgagtaactggaactacaggagcccgcctaacccaaacaaaaacaagaccgggcgcgctggctcacacctgtaatctcagcactttgggaggctgaggcgggcagatcatgaggtcaggagatcgagaccatcctggctaacacagtgaaaccccatctctactaaaaaatacaaaaaaattagccaagcgtggtggtgggtgcctgtaatcccagctactagggaggctgagacaggagaatggagtgaacccgggaggcggagcgtgcagtgagccaagatcgtgccactgcactccagcctgggcgacagagcgaggctacgtctcaaaaaaaaaaaagaaaaagaaaaagaaaaagaaatatctcccctagtttgtctccttttccagaatttaccagataccagtacacagataccagtgcatacattaatgtatgactttcatacatagattctctgatctgatccacaaagagctaaatgtgcatccagatgtggcccctgaacaatccctgctgcccaatatcactgacaccttggggtccacaccccatctccatccatctctggtgtgagcccttcccaggaccatgcccagtgcagcctcttcccaagctcatgtcactaggttatagaagatggaatttaagtgaagatgacaaggactgagaaaaggcatgggttagtgtgagcaaacgtgtgaggcaggatgcttcagactcacagaagactggctactacaatacctggcatttcagaaaggaaagagacagaagaatccaccgaggaatattactccacctgaggaagagccatccctggctccttttctttgctcctcttggtgtcttcctcacgtaacatgagtctttggaaaatcaatcctgtatgtaaaaaaaaatacgagatttaatttttagaaatcactccctcctttcctgtgacaaaacacacacacaggggagacctcaccagggataaagatggttctctgctgcccactgcaccagagattatgtggagataagaaggtgccacaggaagacctacaagggcaattttgacctgttttgaggtcttgctccctcctgcaaaagtccacacacacgctgcagcaggacacagatcttcagggcacagatctggccctaaccaaaccccatgcagagcacagccccctcacctccctgtggatcacaggctgatctcagctctcaacatggaggaaactgccttgatgttcaatgctggagacagatgagaatcacctgcaccattgtaggtattattgagggtgggtcccatactgtgataatagcaatctctgataaaacagcatagaagctatatttgcaaaatgcctgaaaaccctaatgtgaagccaagtttgagctccactcagggcaccagccccgcagagccccaccttctggctctgctctccgcttggggacttgttcccaccaggatccagtgaacagcgaaggagcaaaaaggatcacacagaacaggcaacatgggccagagatgggggtgaaggtggggctgtcatgtcaaatgggggactgtgggagaacacaaaagttttcatagaaaaagtgatgtcagaacaaagacttagggaagaaaggctgcttgtcacttgcagctgagtggccagagagtcctaggcagagggacagcccaggtgaaggccctgagaaaggagcaacctgagtcccagaaaaagaaaagaagcctgcatggttacagtagaggtagggaggaggacagaggcaggagttgatgtcacagagctcctgggactcagatatctagggatgaggtcttgaaacatttttctctcacatctcaactcaaaagaattttggaaatgtattttctcactcattttatgtatacatgtaactttctcttctatactttgtctctgtgtctctttcttttcaaagtgtctcgttccacctgacgagaaatgcccacaggtgtggaggggcaacccacctcttcaccaatgcaatccatcctgggcaatggagcgagactctatcacaaaaaagtacagagtccagccagggaggctgtctcacacctggaatgccagcaatttgggaggccaacatgggaggatcccttgaggccaggagatcaaggctatggtgaggtatgattgcagcactgtactccagcctggacaacaaaattaaaaaaaatatgaaaaatacggccgtacactttaatgagcattcgtgtgaagagaccaccaaacagcctttgtttgagcaacatggctgtttatttcacctgggtgcaggcgggctgagtccaaaaagagagtcagtgaagggagataggggtggggccgttttataagatttgggtaggtaaaggaaaactacagtcaaagggggtttgttccctggtgggtaggagtgggggtcacaaggtgctcagtgggggagctttttgagccaggatgagccaggagaaggaatttcacaaggtaatgtcatcacttaaggcaaggaccggccatttacacttcttttgtggtggaatgtcatcagttaaggtggggcagggcatattcacttcttttgtgattctttagttacttcaggccatctgggcgtatacgtgcaagtcacaggggatgcgatggcctggcctgggctcagaggcctgacatacatgtgccccacgcctttaattccagcactttaggaggccaagaagggcagatcatgaggtcaggagtttgagaacagcctggccaacatggtgaaaccctatctctactaaaaatacaaaaattttgcaggtgtggtggtgcacacctttagccccagctacttggatggctgaggcagaagaatcgcttgaacccaggaggcagaggttgcagtgagttgagatcgcatcactgcacttcagcttgggcaacagagcgagactccatttcaaaataaataaataaataaataaaacaattacccacatgtggtgacccatgcctatctttcaagctctttgggagtctaaagtcggaattacttgaacctaggagtttcaggctgctgtaaactctaaattgtgcctttgtactctaaaactaagccacagagcaacattatctctctctctctccttttttttttttttttttttttgagatggagtcttgctctgttgcccagcctggagtgcagtggcacaatctcggcttactgtaacctcgacttcccggattcaagtgactctcctgcctcagcctcctgagtagctgagattacaggcatgagccatcactcccaactcatatttttagtagagatgaggtttcaccatgtgggacaggctggtctcaaacccctggcctcaagtgatccacccaccttggactcccaaaatgctgggattacaagtgtgagccaccacacccagaccaacatgctgtctctttaaaaaaaaaagtttgaagtcagagacatgttgatctactagtgtgacttcaaatgcactaccaaatcagatacaaactatctccccttataggtctccttttccagaatttaccagatatctgtgcatattaaagtatatgtttcatatgtggtttctctgatctcatccacaaagagctgacatccagacatggcccctgaacaatgcaggctgtgcagcagcactgacaccacggggcccacaccccatgtccattgatgtctgggtgtgagcccttcccaggaccatgcccagtggagcctcttcccaagttcatgtcactggctcacaggagatggaatctcagagcagctgagaggaactgagggcaggcatgggtgagtgcaagtgaatgtgtcagacaagatgcttcagactcagaaaagactggctgctacaatacctggcatttcagaaatgaaagagacagattaatccaaagaggaatatcacttcacctgaggaagagccatgcctggctcctttcctttcctcttctgagtggcttcctcatgcaacatgagtccttagaaatcaatcctgaatgtgaaaaaaaaaagacttcatgtcagaaatgactcactcccttcctgtgacaaaaacacacaaacaagggagacgtcaccctctggaaagatggtcctttgctgcccactgcaccagagatcatgcagagataagaaagtcccacaggaagacctacaagtgtatgtttgaccctggtcttcagatctcgcccccctcctggaggagcctcccccacgaggcagcagtggggagctgggctggactgatctccccttcagggcacagacccatccctgatcaaaccccatccagaggacagcccctcacctctctgtggatcacaggctgagctcagccctcagaaatggaggactcagagcttcgatgctcaatgctgcacacagatgacaagcacctgcgccactgcaggtattactgagggtgggttccatcccgtcagaataagaatccctgctaaagcggcacaaaagctctatttgaaaaatgcctctagactctaatgtgaagccagggttgagctccactcagagggcgtgagcccagcacagccccacgttcaggctctgccctccccttggggccttcttctcaccaggatccagacagtggatggcaaaggagcaaaaataatcacacagaacaggcaatgtggaccagaggtagggtgagcgttgggctgtgtgaaaggaaataaatctttgagccccaaatcactaagcaaaaaggaaaagtcaagctgggaactgcttagggaaccagactccccttctattcaaagtcacccctctgctccctgacatagatgcatgtctgagtgcctcatccaaaaggctaatcagaaactcaaaagaaggacccagcacagtggttcatgcctgtaatcccagcactgtgggaggctgatgcagtgagctgagatcgtgccactgcactccagcctgggcgacaaaacgagacttcatctcaaaaaatacaaaaaagaaactcaaaagattgcaaccatttgtgcctcatttatctatgacctggaagcaccctcgctgcttcaagtccttctggctttgtttaaagttgtcccgcctttccagaacaaaccaatgtatgtgagccaccatgcccggctcaatcctctttttatttatttatttatttattttatttttgagacggagtttcactctgtcgcccaggctggagtgcagtgttaggatctcggctcactgcaagctccgcctcccagcttcatgccattctcctgcctcagcctcccgagtagctgggactacaggtgcccaccgccacgcccaactaattttttttttgtattgttagtagagacagggtttcaccgtgtttgccaggatggtctcgatctcctgacctcgtgatccacccacctcggcctcccaaagtgctgggattacaggcgtgagccactgcacctggcccggcccaatcctcttaaacactttaacgtcaattaatgctcgaactcaatgttaaatcaactcatcctcaggtcaatgctgagttgactgtaatgtacgccttgatggtttgctatactcagtgcattttgaactattacctcaaaatgtacttcttacgtatactgattgatgtctcacgtctccatgtaatgtataaaattaagctgtgccccgtccaccttgggcacatgtcatcaggacttcctgaggctgtgtcacagatgcgtcctcaaccttcacaaaatacactttctaaattaactgagatctgtctgagattttctcagttcaaagctgcaatgtcaaatgggacagaaaggctgcttatcacttgcagctgaggggctagagagtcccaggcagagggacagctcaagtgaaggccctgggacaggagcaacatcaccctcccaacaaaggaaagcagcccgtgtggctggagcagtggaagagagaagggcacaggtaggagatgaggtcagagaggtcctggggacagagatccatagggttaaggacttcaaacatttttctcccacaacccaaaagcattttgaaagtccactgtgatcccagctactcggggggcagaggtaggagcatcgcttgaacccggaagaaggaggttgcagtgaatcaagattgagccactgaactccagcctgggtgagaagagccaaactctgccacacacacacacacacacacacacacacacacacacacacacacacacacacaaaagtgatgtatcttctcagtcatttcatgtatacgtgtaactttctctttatattataaattacaacatttacaaataaaggaatttatctcccatatttcaaaaacatgctgtcaagtttggctaagtccccagaagtacacagtcaccctcatctgagacgtgtaggactgcaagggaatgtgtttgggggtttaggaagtcacttatggacacgtgaaggtggagatgcctgtttgatgtcccagcagagagctgaggagacaactggacacaggattgtagagctcagtggagaggcctgcaggggacatgggtaggtgggttaaagccctgagatgagataaggaaaagcagtgggtgtggacagagacaagaataagttcaagatgatttgagtctaatcccgtttttccattccggtatttgtgggtttttttacatttttggaggacaggaatccatttaaaattcaaatcacacctgagcatcaccctctcctacaggaaaagccacacacttatttggcaaagtatttcaggggtcagcgtcactctgactgagcttttctggtcttattcctcacctgtacattactggttgagtcactgttgttacgagcaggagacacttcaccaagttatcctgagaagctccgagttgagtcagaaggaggtgtggctgattcccacgtgatggtctggaagcgccaataggctgtgttggtcttccttctctagaaaattccaggatgggccgggcatggcggctcaccctgtaatcccagcactttgggaggctgaagtgggtagaccattgagcccaggaatttgaaaccaacgtgggagacgtggtgaaaccgcgtctctaccaaaagtataaaaaattagccaggtctggtggtgtgcatctgtggtctcagctatttgggaggcggactggggtggatcactgggcctgggagatggaggttgcagtgagccaagattgtgtccctgcactcaagtatgggtgacagagtgacactcttgtctcaaaaaaggaagaaaaaagtttcaggaccattctatatacctgagcaaatgaaatgtctctttcaatgtctaaggttttgatggcatgaatcctaaacataattattttctgagaaaaatgattgtaatacgttcaaaataaacacaattttgaacacatagctataagtgtttaaaacattgaaaaagaagcagcggtacaaatgagatctgagcaaatgttttcgtcatgaacatatgggctctgctggaacaaggttccaggtcaatccagcccatccttcaacatctgcaaagaatattatggaccagaggaacttgaagggaacatttacttaaaagctcacagctcactatttagtcagatgacataaagaaaatggaataataggctacatgaactaaattttgatgttagcataaagaaaaagttccttgatatctttatcaagtacacattgaaacaagctaaaatcatttatcaggtaccagaaaatgtttccaatatatgacacagactagaaagcatgcagtcctcaatgtaaactaaacacaataaatttcagagaaaaacaatttacagtggttaaaaaaatatatatatatataataaaatgtggggtcaaagaaatttttcaatacatatcatagttggaaaacaatgatgtgacttcgtaagattataccaaagcttatttgagaagcagttatttactttatttttattttgttgagatggagtctcaccctgtagcccagctggagtgtaggtgcgccatctcagctcattgcaatgtccgcctcctggattcaagcgattctcctgcctcagcctcctgagtagctgggattacaggcactcgccaccaaaccaagctaatttctatattttagtcaagacgaggattcaccatgttacccaggctgttctcaaataccttgcctctggtgatccgcctgttgtggcctcccaaagtgctgggattacaggtgtgagccacagcacctggcttttttttttttttttaattaagaaacaagccgggcttggtggctcatgactgtaatcccagcactttgggaggccgatgcagctggatcgcctcagccctggagttcgagaccagcttgggcaacatggtgaaagcccatctctactaggaacacaaaaatttgccgggtgcaatggcgcatggctgtggtcccagtgactttggaggctgaaatgggaggatcccttgaacccaggaggttgaagctgcagtgagctctgatgctgtcactgctttcatgcctgggcaacagaatgagacccatctccaataaaaatgacaaaagaggaaacacatgcgtcctgggtctggggacagggggaatctaaggccaattaacacgaacctcaggaggtcctgacgatgtgtgcccaaggtgttgaggctgcagtttactttcacacattttatggacacgagacagcaatcaatacataaaacatatacattgttccggtctggaaaggtggaataactggaattggggggcttccgggtcacaggtagataacaaatgatcacattctttgagtctttgatcagcctttcactaaatacacaatttatatgtgagagcgggaggaggaatagtcacttacgtcttagactggagtacagtggcatgatcacggctccctgcagcctctacctcccaggctcaagccatcctcccaatgcagtctccacagaagctgaaccagcagacatgtgccaccatgcccagctaatttttgtattttttgtggagacaggggtttcaccattctgtccaggctggtcttgaataccggggctcacatgacccagctgtctcaacctctgaaagtgctggtattacaggcctgagccactgcatctggtctcatcgcaaatttgatatttcttcttgtttcaattttagcagaatttacattgctttgattgagtctcttttcaaactgattttacccttctgagtgcctcaaactagaccctgttcagacatgttataacagatttgtaccattttattttggtgcaaaaaatgtgacatcatgcacaattttctcataacatgtattttttcatgaacttcgtgaagaccccttgtactagcaaactgtattcaagaggatataaaaaggattgtagatatgcaagtgccacttatttctgagatacaaggatggttcaacatattcaagcaaatcaatgtgatataccacttgaacataatgaaagatgaaaaccacatcatctcaatacatgtagaaaaagcatttcacaaaattcaacatcatcatggaaatcctaccaaaaatagttagagaaggaaatttacctcaacagtacaaagacaatccatgaaacgaccacagtggaaataaacaatcagggaaaatggaatgcttttcctgtaggatctcacatgatgcaagaatgctctcaccctttctattcaatcaatgctggctgtcccagccagaacaatgaaatagcaatagaaatcgaactcatccaaatcagaaagaaagaagtcaaattttatttgtttgtagatgacatgatctgtgaagaaaatcacagtcaaccaaaatacaactggaactaataaacatattcagtgtatttgcagaatagaataatagcaccaaaaattagttgaatttccatacattaacattaaataattttaaaataaaattaaaaaccacttccatttgctaaagagcttaaagtaagaaatatttaggaataaacatataaaggtgagaagtttgtaccttgaaatctacaaacattgatcaaaatgattaaaaacatataaatacacatacaatccatactgattggaaaaattagtattgctcaatgattatataaccgaatgtgatttagattcaacacaatactcatagaaatccccataactttttgttaaagaaacaaaaaacaggccagtcacggtggctcacgcccataatctcagcacttcgggaggtagaggtgggtgaatcataagatcagaaaatcgagaccatccaggctaacacagcgaaacccagtctctactaaaaatacaaaaaattatccaggtgtggtggcatgcacctgtagtcccagctagtcaggagactgaggcaggaggatcgcttgaacctgggaggcggaggttgtagtgagtcaagatcatgccactgcactccaacctggatgacagagcaagagactccatctcaaaaacaaaaacaaaaaaaagaaaaaagaaagaaagaatagaaatgaaaacacaggctgggaaaagtggctcccgtctgttggccaggctgttctcaaactcttaacctccagtgacctaccagtcttggcctctcaaagtgctggcattgcaggcgtgagccacagtgcccagcccagtcctcttaacataaacagtttaatgtcaattaatgcttaaactcaatgttaagtcaactcaaactcaggtcagtgctcatttaactgtaatgtcaattaatgcttgatggcttgctatactaatggcatttgaaacaactgtctccaaaaggaattgtctgatggtctgcaaggagtgatctcggactgaagaccttaccacactgatgacatttgtaagatttctgtccagcatggattctctgatgtctattgaggtgtgaatgtgaagtaaacgctttgccacaatcatcacacttgtgagtttctctcctgtatgaatcctcctatgttttgcataggatgaaacttgactgaagaccttgccacaatcatgacatttataaggtttctctccagcatgagttcgatgatgaatagcaatatatgaacgatatctgaaaaatctgtcacatttattacacttgtaagatctctcattatggattctccaatgatttgcaatggttgtagcattactgaaaactttgtgacaatcattatattagtcaagtttccctatactatggattgcttgatggtgaataagtggtgactgcccactaaaggctttgccacactcattgcacttgtaaggtttctctccagtgtgaattctagtatggtgtgccaggtgtgaatcactcccaaaagccttgttacaaaccttacatttgtatgttttttctccagtatgaattctcctgtctttcaagctgtgatttgtgactgacaactttgtcacagtcttcacatttgtaagatttctctgcagtatgaagactatgatgacttgcaaggtgtgactgttgattaaaaactatgccacattcattacacttgtagggtttctctccaatacgaattgccttttgaattacaaggtatgaattttgaccaaaggtgttgccacactcatcacatttgtaaggtttctctccagtttgaattctaatatgttttgccaggtatgaattatattcaaaaatcttgtcataaaccttacatctgtgtggtttctcttcagcatgcattttcttatgtgtttcaaggtttgatttgcaaccgaaaactttgtcacattcttcctatttgtaaagtttctctgcagtatgaattctatgatgacgtgcaagggttgttttttgattaaaaaccttgccacattcattacacttgtaaagtttctctccagtatgaatggctttgtgacttacaagggttgaattgtgatggaaggtgttgccacactcattacacttttaaggtttctctccactatgaagtctatgatggtatacaaggtttgacatctgactgaaggtcttgccacactcattacactttcaaggtttctctccactatgaagtctatgatggtatacaaggtttgacatctgactgaaggtcttgccacactcattacacttgtaaggtttctctccagtatgaactctctgatgctgtgcaaggtgtgcttgttgattaaaaaccttgccacattcattacacttgtaaggtttctctccactatgaagcctatgatggtatacgagggatgacatctgactgaaggtcttgccacactcattacacttgtaaggtttctctccagtatgaagcctacgatggattataagcgatgatgtctgacggaaggtcttgccacactcattacacttgtaaggtttctctccagtatgaactctctgatgttgtgccaggtgtgaatccctccggaaagccttgtcacaaaccttacatttgtacggtttctctccagtatgaatcctcctatgtctttccatgtgtgatttgcgactgaaaactttctcacattcttcacatttgtacggtttctctgcagtatgaagtttatgatgacatgcaaggtttgcttttgtactaaaaaccttgccacattcattacacatgtatggtttctctccagtatgaactctctgatgttctgtaaggcatgaatcactccggaaagccttgtcacaaaccttacatttgtatggtttctctccagtatgaatcctcctatgtctttcaaggtgtgatttgcacctgaaaactttgtcacattcttcacatttgtatggtttctctgcagtatgaagtctatgatggcgtgcaagagttgattgttgattaaaaaccttgccacattcattacacttgtaaggcttctctccagtgtgaattatactatgttttgccaggtatgaattatatgcaaaagccttgtcacaaaccttacatttgtatggtttctctccagtatgaatcctcttatgtctttcaagatgtgatttgcgactgaaaactttttcacattcttcacattcataaggtttctctccagtatgaagcctacgatggcgtgcaagggttgacagtcgattaaaaaccttgccacattcattacacttgtaaggtttctctccagtgtgaattatagtatgttttgctaggtatgaattacatgtgaaagctttgtcacaaaccttacatttgtatggtttccctccagtataaattatcttatgtgtttcaaggtgtgatttgcgactgaaaactttgtcacattcttcacattcataaggtttgtctgcagtatgaagcgccttgtgaaggaagagggatgtattgtgaccaaagatcttgccacactcattacacttgtaaggtttctcatcaatgtgagatctacgatggcatgcaaggtatcgcttctgattaaataccttgccatatacatcacatttacattgtttctcttctaagtgggttatctgatgtttttttaaaagtgagctacaattaaaggatttgccactctcaatacattggaaagatttttctctcatgtgtacattccgtttttgtgtgagtaatgaagaatggagggaattatttccatacttattagaaatatgggttttgggcctacaacaaattctttgggatgttgaaactgaggaagcattgttgatagacttctcaacttgattaccaattttcccttcaggctgaaatatgtgcagttcaggcagatgcgaatgaaagcttaatccaagctgatctttaatatgcttgtttccagcatgcctttgatcatgttggcctgtactaccagtcaactctttgatttctgtcatgggtgctgcatggtcatttgtttcatcttctttccactgaaactggaagccatgaatgtctttctcaattttctggaagcaaaaatctccaatgtgatgacttgcttgtctttgcaatgtccctgtgtggaacgcttctgtattgccttgccctgttgagaagaatgtcttcatcatgcatttggaagagatatctacaaaatataaacaccaataggtttccaatgaagtacagatggtgtataatactgaaatgtgtaaatatgacacaaaaaacaatacttattttaaacttcccaaacatgatcttcaaagtttaagaacacaaaaggagtaagattctttaataaataaagggcgattatatgtctttcaaatcaattccatgaaagtctatttcctatatcatgacaaaacactgacagggcacaaacatgtgtgagcctaaagtaaggagtgtttttccactgtgaccctaaagtgtatcacactttgcaaaaaacacatcactatcacatcaaaaaaagaaaaatatatattcttcatatttacagcgtatttagtgtatacaaataaatgctaaagaaccacacaatatactatattggtaaataatccaaaacaagctgttgtaaggataaccaaaatcaatggaaattctgtattgtcaaacaatcatagcactgacaagataacaaaagattataaaaattagccaggtatggtggcccgtgcctgtactcacagctactctgaaggctgtgtcacaagaattgcgttaagccaaaggcaaaggttgctgtaagccaatattacaccactgcactccagcccaggtgacaaaatgagcctccatctcaaaaaaacaaaaaaacaaacaacaaaaaaaggcagggcatggtggctcatgcctgtaatcccagtacttctagagggcaaggcaggcagatcacctcacgtcaggagtttgaccagcctggccaatgtggcaaaaccccatctgtactgaaaatacaaaaagtagctggcatggtcacaggtgcctgtaatcccagctacttgggaggctgagtcaggataatcgcttgaacttgggaggcaaagattgtggtgagttgagatcgcaccactgcactccaccctggatgacagagtgagactccatctcaaaaaaaggaaaatgttaataccatatttttccaaataactgttacaaaattacctatatccatgtggaacaggcacgttgtgactttttttttttttttttgcgacgaaatcttgctctgtcgcccaggctggagtgcagtggcatgatctcggctcactgcaagctccacctcccgggttcacgccattctcctgcctcagcctccccagcagcttggactacaggcacacaccgccatgtccagctaacttttttgtatttttagtagagacagggtttcactgtgttagccaggatggtctcgatctcctgaccttgtgatccccttgcctcagcctcccaaagtgctgggattataggcatgagccaccgcacacggccgacttttaaaaaaaattttatgtatttttatttttttgagatacagtgtcactctgtcacccaggctggagtgcaatggtatgatcttggctcaatgcaacctctgccttggggttcatgtgagtctcttccttaggttctgagcacctgggaatgcaggcacatgccactgtgcccggctaatttttgtatttttagtagagatggggtttggtgaaacctgttggccaggctggtctcgaactcctgacctcagatgatccacacatctcagcctcccaagacctgggattacaggcatgagccactgcaccctgtggcactttgtgacattatctaggggagtgtcagttatattgcataccacataccgaaaactcacatataaagtcataaaaatcaattaatcaaatattgcaacccatgataaaacaagcaagaaaataacaagtagatttatacagactgaagaattctaaacaattccctcttaagaaaaaagccaaaacttgtacttaccaccagcacacaacataagaactgaaatagatgttaagatcactactttctgatatatgaggtcaagaaagtatacagcattataaagaatgagaattgactaacagccaggcacggtggcgcatgcctgtaatcccagcactttggtaggctgaggcaggtaaatcaggagttcgagaccagcctgggcaacatggtgaaaccccatctctactaaaaatacaaaaaaattagctgggtgtggtggagggtgcctgtaatcccaggtacttggtagtctgaggcagaaaacatttgtacccagaaggtgaaggttgcagtgagctgagatcatgccactgcattccagcctgggcaacaggatgagactccatctcaaaaaaataaaataagataaataactacttctcaaataagctttggtagatgtggtattctctaataggatgttcctgcagatgcagaccttgagagaatttagcatgggtgtcgactactcatgaataggactagtgcatttatagagacattaaagagcgtgttgcctgttcctcttttcactgtattaggacacagcaggaatatggctggtctaaagcatgaagaaggctgtcaccaggaaccaatttggctggcaccttgctcttggatttcccactttccaaattcatgagaaatcaatgtctttgtcttaagcctcccagtttaagcaatttccttttttgtttgtttttgagatggagtcatgctctatcacccaggctggagtgtagtggcatgattctcctacctcaagtgattctccctcctcagcccagtcttactctgtctcccggtctggagtagagtagcgtgatcttggcgcactgcaacctccacctcctgggttccagtgattctcctgcctcaacctcccaagtagctgggattacaggcgcacgccaccatacacagctaatttttgcatttttagtagagacagggtttcaccatattggccaggcttgtctcaaactcgtgacctcaagtgatcaaccgatcgcagtctcccaaagtgccaggattacaggtgtgagccactgcacctagcccatttttggcatttagtaaattcgaggtttcaccatgttggccagactggtctcaaactcctgacctcaagcgatctacccaccttggtctctgaaagtgctgggattagaaaagtgagacatcacagctggccagtctaagctatttctaacaggacagtgaaatgacagagacaggagaaagagcatctcatcatcaacatcaccaaaggctgacaaatcttattaaacaaaggaagttaagagtctgtactgtaaaacttgcaatacttgaagccatctaatagcactaacatgttttaaaaaacttgagacaggccaggtgcggtggctcatgccagtaatcccagcattttgggaggctgaggtgggaggatcacaaggtcaggagattgagaccatcctgcctaacaagctgaaattctgtctctactaaaaaaatacaaaaaattagcccgcggtgttggcactcacctgtagtcccagctacttggaaggctgaggcaggagaattgcttgaacctgggaagtggaggttgcagtgagccgaggtgacaccactgcactttagcctgggtgacagaccgaaaatctgtctcaaagaaaaaaaaaaaagaaatgaaagaaggctaaagagtaactccaacccacaagcatatataaagttctccaggcctggtgtggtggttcacgccaataatcccagcactttgggaggctgaggctggcagatcaccaggtcaggagattgagactatcctggccaaccaacatggtggaaccccatctctactaaaaatacaaaacttagctgggtgtagtggtgcacacttgtagttgcagctactcgggaggctgaggaaggagaattgcttgaacccagaaggtggaggttgcagtgagcagagatcacaccactgcactccggcctgggcgacagagtgagactccatctcaaaaataataataataaaaataaataaataaataaataaataaagttctccagtaaaggtagtaaaaacagataggccaagcatcgtggttcatgcctgtaatcccaacactttgggaggatgagctgggcagatcacctgaggtcaggagttcgagtccagcctggccaacaaaaagaaacagtctctactaaaaatacaaaattagatgggtgtggtggtgcatatctgtaatcccagcttctcaggggcctgaggcaggagaatcggttgtacccgagaggcagaggttgcagtgagctgagatcgcagcatcgtacttcagcctgggtgacaacagcaaaactcagtctcataaatacataaagtaattaattaataaaaggacagatacagaaactggcatatgtataccttcataactaaacttttttcatatttaaaataaaaggcatgaaaaacactgtacatatatgttaacaaaaatgcaacatacacagaaataattctgacaaataaaaaaatgttctagtggagaagaagaagtcatttttgcaggttacagaattttttttttcttcttttgaaacagagtttcactctgtctcccatgctggagtgcaacggtgcgatctcggctcactgcaacctctgccttccagattcaagtggctctcctgcctcagcctcctgagtagcttggattacagccacccaccacggcgcctggctaatttttgtaactttagtagagacgaagtttcaacatgttaaccaggctagttttgaactcctgacttcaggtgatatgcccatctcagcctctcaaagtgctgggattacaggtgtcagccactgcacacgtccaggttatggtaattttaagtttctttattatgctataactttaatatgtttaacatacctgcaacaataacctctgcccaaatatctaaagaactacaagacaaaactatttaaaataataacaatggttaggcatggcagctcatgcctacggtcccagtgttttgggaatctgaggcaagtgggtcacttgagatcagaagtttgaaaccagcctggccaacatggtgaaacactgtctctactaaaaacacaaaaattagctgggcatggtggtgagcgcctgcagttccagctactcaggaatctggggcataagcatcctttgagcccaggaggcagaggctgcagttagccaagatcgtaccagtgcactgtagcctgggcaacagagtgagactctgtcataaaaaaagagagaaagaaagaatagaaagaaagagcagagagataagcgggggcaaagaaagatatcttttcagagatgtgaggatttaaacttttcttttgccacagaattctcccacttgcagagagtttccccacacactatttgaaggtggagcttccactctgcccatctgagctcttacctgcgtttgcacctgtaatacattcccacccatctggatttttttgttattttcacttaactctccacagtccagggctctttcccttgctccaacatggagacagcaggtcagaaagagactcctgcttataaaaagaaaggaccataacatgctggagcttttctagagtcccagccctatgtttctgtaggaaagaagacattacagatgaatctaggaaaatatttcacaaattcctccactgactgcctcattctgaatgcttggggagcactgtaatatgtagtatgtggacatcgagctctcttccaagaactacagaatcgaaagcacaggagaagcaaacagggaactggatatctttaaagtctgccataaggtttgtttttgtctttgttttttgagacagagtcttgctctgtcgtccgggctggagtgcagtggtgtgttctcagctcaatgcaaaacttggcctcctgggttcaagtaattctctttcctcagcctctctaggagctgggattacacatatgcatcaccatgcccggctaacttttgtatttttagtacagacagggtttctgcatgttggccatgctggttttgaactcctcacccatagcgatccacacgccttggcctcccaaggtgctgggataacaggcgtgagccaccacgaccaggctgccataaagttttatgcctactttacttctggaagctccactgagctatcatgaagaatgcagaacctctaaacaaaggggacagtgaaagtccagatgctacatcatgaagcttttcatttcaaaatcaatacggcttccattttagtcaagtaaggatgtggctcccaagaggcaacaagagaaaatacaaagatacacaagggcacatccccaggaggttatcctcacccagggagaccaggttcctataattctccagcatcacatccctgtaaagagtcctctgagcagggtccaggcatttccactcctcctgagagaattctatggccacgtccctgaatgtcaatagaccctgaaatggaaacacattttaaccaaatggttatggtggagttcttatctttacagaaaatgacaagagagggggaaagcatggatttagttgtagtgaatgttctcacaaatccgagtgacggatttttcaccacatgatgtttttattatactttttgaagtgatcaagacacactttcagtatgaaattcctaagtttgtgaaaaattcaagaaataaataaaaaatcagtgttggattcctgttataaaaatgtttgaaacttttatagacacaccaagtgacattcattatctagatgagagagagcatgactgatgtcttaaaagatgacaatgtccacagtaagagacaggctgggcacagtgacacatgtctgtaatcccagctacgcaggaggctgaggcagaattgcctgatcctgggaggcagaggttgcagagatcccagacagtgtcactgcactccagcctgggcaacagaaactccatctcaaaaaaaaaaaaattaaaaaaaaaaacaaaaaacattagctggacctggtggcaggcacctgcggtcccagctacttggaaggctaaggagggaggatggcttgaccctgagggtggaggttgcagtgagctgtgatcccaccagggcactcaagcctgggcaacaaaccgagaccccatctcaaaataaaataaaatacgtgaaaacaaaattactcaaagtacaaaaatcaattgtgtttctaaattttcacaaaataataaaacctagagactcacaaaacactagatgtgaatacaaagggttgtcatttgtcccagattttcaaaatataaaagattttcaaaatatatacagatgtgtgtatatatgtatttgtatgtatatgtgtgtgcatgtgtgtggggatatatatgtacatatatgaagttttaaaaaatataaaaagtagcaagttttgtttaactgaagaggaatctcatcttgctggaaaaggacacttgggcagttgcgggcagggggaatcttgtcagatctaagaaaatggaaatgccccatcctagaagaagcaatcaccctttcaactgcctgacctggaggaatgttcagatatctgtagtaatgcggacgtgcacagaggcagccactatggcactctttatacagggaaaagttgcaaaggacacatgtgttgtcattcagccaatttccaatgcagatgtcaaagagcaagctagccatgtttactaacatgacaacatgtaaattcacaactagcaggatgaaatatcgaactaaaatatttactggaacacaaagaagaaaatagacactggcgtctacttgagggtggagggtgggaggaaggagagaaacagaaaacataactattatgggcctggcgcggtggctcacgcctgtaatcccagcactttaagaggtcaaggcgggtgaataaccaggtcaagagttcaagaccagcatggccaagataatgaaagcccttctctactaaaaatacaaaaaatagccagacgtggtgttggctgcctgtaatctcagctactcgagaggctgaggcagcaaaacgctttaacccaggaggagggggttgcagtgagctgagatcatgccacttcactgcagcctgggtgacagagcgaaaaaaaaggagcccagtctgagcggcgaaggcggcggcggcggcggtggcggtggtggcagtagcactgggcctgcgggcggtccgggatccaggccggggcggcgccatcttgtgcccggggccggtggggaggccggggaggttgccccggggggcgcaggggacgatgggaacggcctggagtctgaggaactggagcctgaggagctgctgttggagccggagcccgaagaggagccgctccagccccgcgccccatgcctgggagctccaggacctgggcctcgttcaggagccaccggcagccaagaggagggggaggagccgggactggtcgagggtgacccggggctggaagctatcgaagctggagtcagggaggtggaggaagaagctgagaagctaaaggagctacagaacgacgtagagaagcagaggaatatgagtctacctccaggcaatgctggcccagtgatcacgtccattgaggagaagatggaggctgatgcccgttccatcaatgctggcaatgtggactgcggtgcaacagcagaagagctggaagctcactttcatggctgtggttcagtcaaccacgttaccatactctgtgacaaatttagtggccatcccaaagggtttgcatatatagagttctcaaagagtcagtgaggacttccttggccttggatgagtccctatttagaggaaggcaaatcaaggtgatcccaaagcgaaccaacagaccaggcatcagcacaacagaccggggtcttccacgagcccgctaccgcgcccgaccaccaactacagcagttcctgctctccattctacagtggttttaacagcaggctctggggtcgcgtctacaggggccgggctagagcgacatcacggtattccccttactaaaaaaaatgtgtattaggagagagaggaaaaaaagaggaaagaaggggaaaaaaaaagaataaaaaaaaacccaaaaaaaacagaagatgaccttgatggaaaaaaatatatatatatttttaaaaaaagagtccctctccctctccctctccccctccccctccccctccccctccccctccccctccccctccctctccctctccctccacagtctccctctgatgccgagccaaagctggacggtactgctgccatctcggctcactgcaacctccctgcctgattctcctgcctcagcctgccgagtgcctgcgattgcaggcacgcgccgccacgcctgactggttttcgtttttttttttggtggagacggggtttcgctgtgttggctgggctggtctccagctcctaaccacgagtgatccgccagcctcggcctcccgaggtgccgggattgcagatggagtctcgttcactcagtgctcaatggtgcccaggctggagtgcagcggcgtgatctcggctcactacaacctccacctcccagccgcctgccttggcctcccaaagagccgagattgcagcctctgcccggccgccaccccgtctgggaagtgaggagcgactctgcctggccgcccattgtctgggatgtgaggagcccctctgcctggctgcccagtctggaaagtgaggagcgtctctgcccggccgccatcccatctaggaagcgaggagcgcctcttccccgccgccatcccatctaggaagtgaggagcgtctctgcccggccgcccatcgtctgagatgtggggagcacctctgccccaccgccctgtctgggatgtgaggagcgcctctgctgggccgcaaccctgtctgggaggtgaggagcgtctctgcccggccgccccgtctgagaagtgaggaaaccctctgcctggcaaccgccccgtctgagaagtgaggagcccctccgtccggcaaccaccccgtctgggaagtgaggagcgtctccgcccggcagccgccccgtccgggagggaggtcgggggggtcagccccccgcccggccagccgccccgtccgggaggtgaggggctcctctgcccggccgcccctactgggaagtgaggacccctctgcccggccagccgccccgtccgggagggaggtgggggggacagccccccgcccggccagccgccctatccaggaggtgaggggcgcctctgcccggccgcccctactgggaagtgaggagcccctctgcctggccagccgccccgtccgggagggaggtgggggggacagccccccgcccggccagccgccctatccaggaggtgaggggcgcctctgcccggccgcccctactgggaagtgaggagcccctctgcctggccagccgccccgtccgggagggtggtgggggggtcagccccccgcccggccagccgccccatctgggaggtgaggggcgcttctgcccggccgcccctactgggaagtgaggagcccctctgcccggccacgaccccgtctgggaggtgtgcccagcggctcattgagaacgggccatgatgacaatggcggttttgtggaatagaaaggcgggaagggtggggaagaaattgagaaatcggatgattgccgggtctgtgtggatagaagtagacatgggagacttttcattttgttctgtactaagaaaaatacttctgccttgggatcctgttgatctgtgaccttatccccaaccctgtgctctctgaaacatgtgctgtgtccactcagggttaaatggattaagggcggtgcaagatgtgctttgttaaacagatgcttgaaggcagcatgctccttaagagtcatcaccactccctaatctcaagtacccagggacacaaacactgcggaaggccgcagggacctctgcctaggaaaaccagagacctttgttcacttgtttatctgctgaccttccctccactattgtcctatgaccctgccaaatccccctctgcgagaaacacccaagaatgatcaataaaaaaaaaaaaaaaaaaaaaaaaagttttaagtgtgctgtgtagagagtggcatgcttggatgacataaactgggcaagcctttgaggaaatgcatcaccctgattactatagttttaaggctacttaaaaggtccctatgtccaaagaataccctctctgctcactggatagcaggtgaaattccacaatctgagcttcaatccttgaggttaatgcttagtaataaagttaaactaaactatcacccaatttaagcaatttatacattgtgaaaagagaacaatgcaactcagatgaaattttcctaaatctccagttgtggtaatcttggttaatgctttattgtcactataccaatacttttgcatgtatttaaaatgacgctactcatagtaattgcttatctgctcagtggagcaatttaggactacccagcagtcttttaaaaccttggcatttatgaagattaaaaacttgaatggtgaaaaaaaaaaaaaaaaaaaaaagacatactgtggaaggacagagaatccctaacaaactgctgaggagggacctgttttggggagcaggggaaggcccagggagtggggcagggggcggcttattcactctggggattcgccatggacacgtctcaacagtgcaagctgctccccgtgtttccctgccccacttcgcccccgtaggggctgctccagggtaggcgggcgggggtggtaggaggtttttttttttacccagggctctggaaggacaccagactgttcggcttgtcaccttccctccgtcttctcctcacctttcacagtcccctcctgcctgctcctgtccctccaggtctaccacccaccccacccctcttctctggccccctgcccctccagattgcctggtgatctattttgtttccttttgtgtttctttttctgtgttgagtgtctttgtttacaggtttctgcagccagaagatctccgttccgctcccagcagctccactgtaaattccccttccccatggggaaatgcactaccttgttttggggggtttagaggtgtttctgtttttcagttttttgttttgttttgtcttcctttgccttttttcccttttatttggagggaataggaggaagtgggaacagggaggtgggagatggactctgtttatttttttaagctcatttccaggggtgggaattttttttaatatgtgtcatgaataaagttgtttttgaaaataaaaattgtttggacttttacaaaaaagaaaaaacttttttaagttactacagaatttcttctaaagcctcataatgctgcagaaatacacgtgtacaagacttgctctgacacctggcacagaactgacagtaacggctccccagggaggctggaaggaggatggaggacgtgacagggaaaggagatgctttatggccaagggtctaagctgcagctttcttggagcgttaccaccaaacaaatatacacatcgtgtgatgtttaaatataaccatatatatttaataacaattggtggggctgggcatgatggctcgtgtctgtaatcccagcattctgtgaggctgaagcaggcggatcacctgaggtcaggagttcaagaccagcatggccaaaatggtgaaacaccgtctctcctaaaaatacaaaaaaaattagccacgggtgatggcacgtgactataatcccagctacttaggaggctaaaacaggagaatcacttgaacctgggaggcagaggctgcagtgatccgacatcacaccactgcattccagcctggacaaccgagactttgtctcaaaaagaaaaaaaaaagctgggcgaggtggctcacgcctgtgatttcaaaactttgggaggctgaggtgggcagatcacgaggttaggaaatgaaaaccatcctggctaaaaaggtgaaaccccatcactactgaaaataccaaaaaattatctggacatggtggcactcgcttgtattcccagttactcaggagcctgaggcaggagactcgcttgaaccaggaaggcagaggctacagtgagccaagatcacaccactgcgctccagcctgggcaacagagccagaccttgtctcaaaataaaataaatatatgaaaacagaattactcaaagtacgaaaatctttttttgcatatatatgccccaaaaataataaaaccttcaaagactcacaagaaattagatgttaataacaaagtggtcattttccccagactttcaaagtatacatgtgtgtatatatgtatgtatatgtatagatatgtgtgtatgtgtgtgtatatatatatttatatatatatataaaggtttttaaaatataaaaagtagcaagatttgtttaaccgaagaggaatcttgccttggtggaaaggatactttggcagtgggaggaaggagaggagcagaaaaaataactattgggcccgggcacagtggctcacacctgtaatctcagcactttgggaggctgaggctgctggatcacctgaagacaggagttcaacatcagcctggccaacatggtgaaactcttgtctctattaaaaatacaaaaattagccaggtatagtggcaagcacctgtagtcccagctactcgagagtctgaagcaggagacacacttgaacccgggaggtagaggttgcagtgagccgagatcatgccataatactccagtctgggcaacaagatcataactcagtctcaaaaaaataaataaaaaaaataactgtctgggcgtggtggctcacgcctgtaatcccagcactttgggaggccgaggcgggcgaatcatgaggtcaggagatcgagaccatcctggctaccacaatgaaaccccatctctactaaaaatacaaaaaaattagctgggtgtggtggcaggtgcctgtggtcccagctactcgggaggctgaggcaggagaatggtgtgaacccaggaggcggagcttgcagtgagccgagattgcaccactgcactccagcctgggcgacagagcgaggctccatctcaaaaaaaataaataactatcgtgtactggccttgacaacggtgtgatgaaataattggtacaacaaactccaatgacgtgagtttgcctctgtaacaaaccttcacatgtagccccaaacgtaaagtaaaaaaaaatacataaaaatttttctttaatttacaacagaattttttttaaagtctcataatgatgcagaaatacacgtgtacgagactcgctctgacagctaacacagaactgacaatagtggctcgccagtgaggctggaaggagggtggaggatgtgacagggaaaggagatgccttatggcaaagggtctaagctgcagctttgcttggagttttaccacaaaatatatacatcatgtgatgtttacatataaccatttatattcaataataattgttggggctgggcatggtggcttgcacctgtaatcccaacactcttgggggctgaggcaggcagaccacctgaggttaggagttcgaggccagcctggccaacatggtgaaaccctgtttctactaaaaatacaaaaaaattagccaggcaagccgggcgcggtggctcaagcctgtaatcccagcactttgggaggctgaggtgggaggataacgaggtcaggagattgagaccatcctggctaacacggtgaaaccccgtctctactaaaaacacaaaaaattagctaggcatggtggcgggtgcctgtagtcccagctacttgggaggctgaggcaggagaatggcatgaacccaggaggcagagcttgcagtgagccaagatcataccaaagcactccaccctgggtgacagagtgaaaacatcatctcaaaaaaagaaaaaaaaaattagttggggatggtggcgcgcacctataatcccagctactaggtgggttgagacagagaatcgcttcaacctgggagacagaggttgtagtaagctgagatcatgccactgcactgcagcctgggcaacaaagcaagactccgtttcagaaaataataataataataataataataataataataataaaacgtggaatgagaatacagctttatcctcttagataaaaaagcagtactctccaatattagagaaaaattgcaaccacttttaccaaaaacacctgtttcacaagcctctccacagtaacaccatagtctccgtgagctcgatgtgttaagaatggttgaatgactctcctgctattatttacattgatttcatgttcttaaaataatgaaggaataggccaggaacggtggctcacgcttgtaatcccagcactttaggaagccaaagtaggcggatcgcctgaggtcgggagtttgagaccagcctgatcaacatggagaaacctcgtctctactaaaaatacaaaattagctgagcatggtggcgcatgcttgtaatgccagctactcgggaggctgaggcaggagaatctcttgaacccaggaggcggaggttgcggtgagctgagatcacgccattgcactccagcctggataacaagagtgaaactccgcttcaaaaaaaataataataatgaaggaatcattaatgtattattcatctatgtatgaacattccattctaattagtaagatttttggagtcagaaacacaggaactcactcaattacctaaaaatgtggtataaaatcagggagaaaagattttcccttattggtctccttttctagaattgaccacgtactttgtgcacattaatacttgactcccattggcagctgctctaatcctggtccacagagagctgacagtgcatccagatgtggcccctgaacaaaccctgctgcccaacagcactgacaccacgggaccctcaccccgtctccatccatgtctgggtgtgagaccttcccaggaccatgcccagtgcagcctctcccatgttcatgtcactgggtcaccagagatggaatctaagcgagatgagatgaactgaaggaaggcatgggtgagggtgagcaaacatatcaggcaggacacttcagactcagagaagactcccaactccaaggcccagcgtttctgaaaggaaggagacagagcaatccaccgagaataccatctcacctgaggaagagccatccctgactcctttgctttcctcttcctcttctgggtttcttcctcacgtaccaagattctttagaagtcaatcctgaatgttaaaaatatgttgtttattgctcagaatcaacacatcccctccctgtaacacaacaacacatacaaaggagacttcaccttgaggaaatatggtcccctatgctgcctaccgcaccacgaacaaaaaattcctacaggaaaactcccactctactcctggagaagcccacacacacgctgcagcagtggggagctgggctgggatgagctccccttcaggaaatctctaccataaatacaaaaacttagccagatatggtggtgcgcatctgtgtgtctgtggtcccagctacttaggaagctgaggtggaaggatcacttgagctcagaagttcgagaccagcctggccaacatggagaaaccctctctctactaaaaatataaaaattgggctgggctcagtggctcatgcctgtaataccaacactctgaaaggccgaggtgggtggattacttgaggtcaggagttcaagagcagcctggccaacatggtgaaaccctgtctctactaaaaatacaaaaagtagccgggcttgatgcgcatctgtaatcccagctactcaggaggctgaggtagaattgcttgaacctggaaggtggaggttgcagtgacccaagatcgcgccactccactcctgcctgggtgacagagtaagactcaaaaataaaaaaatacaaatacaaatacaaaaattagcagggtgtggtggcacacacctgtaatcttagctacttgggaggctgaggcacaagaatcacttgaacccaggagatacaggttgcagtgagccaagatcacaagactgcactcatagcctggaggacagaatgagagtctgtttgggaaaaaaaaaaaaaaaaaaagtgcatttctgatgggactgacacagagataagaagacttgagtaatgtgatagacactgatgggcagagggaacttcagatgggggtgggagggcatgggagacagctctgagcctagatctgaaggagaaagggacagtgccatcttcatttagaaacattgaataagaacagggacaacaacctgagacaggaaggattttgatgtttgaaaaaagagaaaagcaaatgtgactggggcagagggagtcagatgagggtaagctcccaggaggaggctggacactggcagggaccctgaacacagggctgtggagccaaagtgaagagttgggcttttgtcctggggaacacgggaagcaggtggagggttccctgccaggcactgacatgacctgctttagatgtagctgtgatattctaatacagacaaagtcctccgaagatggtctctctttctgagtctaccactctctttcttccattctattgcttttttttttcatttttggggtactgcatcccactgaaaattctaattacaactgggcactcccctctaccagaaaaaaagccacacccagacacccactctattttgccaatcatttcagtggccagggtcactcgggttgagcttttctggtctagcccctcatctccaagttgcaggggaggctcactggggctcagagctggaaacattttcacgaagttaccctgagaaggtctgagatgagtgagaaggtgtgcctgaattcttacatgggggcctggaagggctaatgggatggactggtcttatcatcccatccttaaaattagagaagcatctttcacatgcctgggttaaagaaaattcttttgaaaggttctgatgaaattgactcccaacattgaattcttccttacaagaaaatcacactaacatttataaaatgcagcagtgtaaacacacagctcttgaccttgaaaacagggtcaactgtagaactaagacataagcaaattatttcaatcaagaatacatgggtggacagctgaggtggttcacacctgtaattccagcactttgggaggtggaggtgggtggattacctgaggtcaggagtttgagaccaacctggccaacatggtgaaaccctatctctactagaaatacaaaaattagctgggctccatccttgcaacttatttaacctcttttttttttttttttttttgagacggagtctcgctctgtcgtccaggccggactgcggactgcagtggcgcaatctcggctcactgcaagctctgcttcccgggttcacgccattctcctgcctcagcctcccgagtagctgggactacaggcgcccgccaccgcgcccggctaattttttgtatttttagtagagacggggtttcaccttgttagccaggatggtctcgatctcctgacctcatgatccacccgcctcggcctcccaaagtgctgggattacaggcgtgagccaccgcgcccggcccttatttaacctcttgttggtccttctccccaatctttagatcgtcctcaatctccatagatttccacctcttctcccctctctgctctccctgttaaattctctcttctctgttataaccccctggacccagtctggcaccccagatccccaggtgtcctccccgctgtgcttctccctctgttctccttgccaccagcaccactctgctctgtctgacccggctccacatccctcctcctctccctcactctgatgagcctccacatttctgcccctctccctaccttgctgtctgtccttcatctctctgtacatctagcttttctctacatttctccagttgcttttctcctcctgctttcttatcttttatcacttttgctgtctcttggcaaatccctcaccatcctctactttgccatctgttatgggtctttctcattcttcttttctctgtctcaggttttctactgctctcttagtccctctctctgtctcctgatccctttggcccacacgatcacacgagggtttggagtaagacacctgcatctcggagaagcgcattttcccagagctggagctgggcgggcaagaacaccccgcgtcacaggacaagccccaggcacctctccaacgcgggctcaggggaagcggtgactgcggaggggagatctggggagcagcagggcccagcaagaggaggagggaggtggggagcgacgacgccttcggacaagggtgggatccgcaggatcccaggaccacagaacgcagccttcccgggactggggtcgccgcgctgtgctccaggaacccaggaggatgaggctgggaggcgcacagggtgggaatacacctctagggtgaggactttaaaaagagccgtgcggaaggagtcaaaaaaaggttttgagcaggaaaactacgagataggaagtgtatacattgccctgtagcagaaagacccgggacgggaccagcctcagggcgactttaaacctaaaaagaaggggcttccggactcccagtagaacatctccatttgctctgagtgaacgaagaaaggggagaacttccaggtctagggggaccccacatcccatgtacagaagtgccggggacctgggaagctcagacttaacaccacacagagcaaaactcaccgcccgccgcggcgtcaccgtcattccacgggatccgcttcctggtctgcgcgaatctgcgcgcgcaggacagaaaccaggcctgggtggagccaacgaggaggcgagcggggcccgggtgaggtgtgggcggggcgcgaagcggcgagaccttgccctttagaacccgcagagggcggggccggagcgggacctgtgagtctcagcctcctcccaggccatgttctcaggcttttgaacccgggagatacagcttgcattgggccgagatcgagccactgcacaccagcctgggcaacagagccagactccgtctctaaaaaaaaataaaaaaataaaaaaataataaaaaaaaaatttgcttgtgcgagacagggatacaacattactcttttccgtgtggatatccagttagttgtcccagcacatttgtaaaagagatctattactttctcctttttatttacatttttttcttttctttttcccttttttttttttttttttttgaggctatttctctgtcgccctggctggagtgcagtggcgagatcttgactcactgcagcctctgcctcctgggttgaagcgattcttctgcctcagcctccggagtagctggcactacaggcacacccaccatgcccggttaatttttgtattttgtgtagagacaggatttcgccatgttggacaggctggtctcgaactcctgacttcaagtgatccgactgccttggcctccccaagtgctgggattacaggcctgagccactgtgcctggcccaggaaatactctttactttgctttttaaatgttgagaaaatacaactgaaaactaaaaaatcttccccgaaatgagaaatcatcttcatgacaaaacaggaagaaataagaactattctattaatgaataagccttagaccagaatgtgttgggaaatagaggcaaacagctaagaggttgaaaagagagaaagaaacttcattgttctatgcaacccgttaagtacatgttttcaagataaacactaatcagtcctcagggaagattagttgacaacagccttggtcgcacatagttcatcctggctgtacttggtaatggaggtgactatctgtgtcagctagttagcttcatgcagagagaggggaattactttaacccacgtctttttgacaagtgtgagttttacaacatggaggcaggtgccgtctctagtgaggctgctacagtccgacagaaactgacgtcagcagtaaataataaaatttagaatacataattaactatagagtttattggaacacaaagcttgaggatagccacctggaaacgtcaactccaaatgaagggggcccgtgttcccaagtagagacgttaaggtttcacacacagggaaagacagagaagctttaccagaatcacattttccattcaaggccagtgcataggctgcagcaaattgattggttatggattgatacacttcaaggaaggttactttatcactccataagaagggacaatgatgccaacaggttagtcttcctaattatttacaggtaaactttttttaaaatttatattaggaaactaaattttattgcactttttgttttgttttgttttggtttggtttttggtacggagtcttgctctgttgcccaggctggagtgcagtggtgcaatcttggctcactgtgacctccatctcccgggttcaagcagctctcctgcctcagcctcctgagtagctgggattacaggcacacgccaccatgcctggctaatgcttttgtattttcagtagacacggggtttcaccatgttggccaggctggtttctaattcctgacctcaagtgatccacccaccttagcctcccaaagtgctgagactacaggcgtgcgccaccgcacctggccagtaaaactcttagaagttgcgcctgcacaccactggactcaggttgcatgaccacgttcctctcaaagctcagaattatttaaatgtccgtagctttaaatttgaaatatttgatgtttgaattatttaacttcctactgagatataggtactatcgcccttgtagtttgccttacaaggatcgttcccaagaccttcagaaatacatccttgggtcattaaactgaaaaaaggcttagttactttctaaaaaataccacttcaggccaggcgcggtggttcaagcctgtaatcccagcgttttggaaggccgaggaggacagatggcctgaggtcggaagttggagaccggcctgaccaatatggagaaaccccatctctcctataaatacaaaaattagcctggcctgttggcatgtgcctctattcccagctactcgggaggctgagggaggtgaatcgcttgagcccaggagacacggaggttgtggtgagccaagatcacgccattgcactccagcccaggcaacaacagtgaaactccgtctcaaaaacaaaaaataaataataataataataataataataaatatggccggcgcagtggctcatgcctgagtgagactccgtctcaaaacaaaataaaacaaaacaaaacaaaaaacaaaaaaaacacattaccagttccacagtagggtgtcctcaaaaacaaaggaaatgcctcctctttaagtttttcttacataggcatccaggtaaatacaaagatatgtctacctgccggttggctgacagtctaacacaacttattactttgttgatttaaagctatccatgactggtcgcggtggctcatgcctgcaatcccggcactttgggtggccgaggtgggcagatcacctgaggtcaggactgtgaaaccagcctggccaacagggtaaaaccccatctctactaaagatacaaaaattagcgaggtgtggtggtgcgcgcctgtagtcccagatactcaagaggatgagacagaagaatcaattgaacctgggaggcagaggttgcagtgagctgagattgtgccactgcactccagcctgggtgacatagagagactccatctcaaaaaaaagaaataactaactttaaagacgaaaataaagaaaaatctggagaggtctcaggaatctctagccagtctgattggagagtgttcttcctcactgaagtcagacaccaaaaaccgtgaaagctggctgatttctgaactgctgaagttccaacagaacataaccagatatacaaagagataacgtggatgatcccaagaaattatacacaaatttataaaacagagacttagaaataacgggactaaaaattcaaaataagcctgggcaacatgttgaaaccatgtttctaccaaaaatacaaaaattagctggacacggtggtgcacacctgtagttccagctacttgggaggctgagatgggaggattgcttgagcctgaaatgcagaggctgcagggcacatggtgctctctcatgttctcagagagggcgcttttacacctgggggtagggatggaatcttcccagatctaagaaatgaggaaatgccacgtcctagaagaagcaatcagtttctcaatagcccctcctgcaggaaccctccagatacatgtagcgaagtcagcacactcacaggcagccagtgtggcattcttggtaacagtgacaaactgggaaggactcacgtgtcttcattcagaaaatgctccaaggagaatgaaaaacagtaagctatcttgcttcctaccttgaaaacatggaatattttaagacttgcaggataaaataccacaacaaaacatttatcatgttgagctcagtggctcacgcatgtaatcccagtacttgggaggccgaggagggaggatcacttgaggccaggagtctaagaccagcctggccaatatggagaaactccatctctactaaaaatataacaattagccaagcatgatggcacatacctgtaacacagctactcagttggctgaggctagagaatcatttgaacccatgaagcagaggttgcaatgtgctagtaagttccagcctgttgacagggtgagacaccggtctcacaaaacatacaaaacaaaaaacaacaacaaaaaaatcatttggccgggcacagtggctcatgcctgtaatcccagcacttcgggaggctgagggggatggatcactagaagccaggagtgccagaccaccctggccaacatggtgaaactccatctctattaaaaatacaaaaaacttatccaggcatagtggcacacacctttagtcccaggtattcaggaggctgaggcacaagaatcacttgaacctggaggaaagagtctgcagtgaggcaagattgcgccactgcgctccagtctgggtgacaggcacattcatcaaataattttatctaaaatctcataatggtgtctgaatacatttctgtaggacttacgctgacttgccacagtactctcagcagtgattccccattgagccaagggaactggtggaaggctggacaggaaaggggatgcctaagtgaactttctttgtccgggagtggttgctcaacgcctgtaatcctagcactttgggaggccgatttcttgttttaaaagcaataatagaacaaattatcctctaccactgatgttacctccactttccattccattctaagtcattaaaagtgcagagtcaaaactgggaattgcggcaaatgcttgtaatcccagcattttgggagtccaagatggatggatcacctgagttcagaggtctgagaccagcctgaccaatgtggtgaaaccctgtttctactaaaagtacaaaacttagcgctgggtgggctggctcacacctgtaatcccagcactttgggaggatgaggtggaaagatcatgaggtcaggattttgaaagcagcctggccaacaaggcaaaaccccatctctactaaaaatacaaatattagctgggtgtgatggtgcatgcctgtagtcccagctactcagaaggttgaggtaggagaattgcttgaacccgggaggcagaggttgcagtgagccgagaccacaccaatgcactccagcctgggtgacagaatgaggctccatctcaaaaaacaaacaaacaaaaactcagctgggcctggtggtgcacacctgtagtcccagctacttgggaggctgagccaggagaactgcttgaacccaggaggtggagggtgcagtgagctgacagatattgtgccactgccatccagcctggcgacagagcaagactccattctcacccacctaaaaaagaaaaaaaagtgcagagtccagccaggctggctgtctcatatctgttatctcagcaatttgggaggctgaaatgggaggctgaaatgggaagatcacttgaggccaggagctcaaagctatagtgagctttgactataccaccgtactcctgcctggacaaaatagcaagatcccatagccacataataaaaaatgaaagacttagccagatatggtgacacatgcctgtcatcctagctccttgggagggtaatgtgtggatcacttgagaccaggagttcgaggctgctataaactagaattgtaccattgcactccagactgggccatagagcaaaaccctgtctctaaaaacaaaaaaaaaaaaagaaaaaaagaaaattggcttcaaatgcattacaaaatcagaaacaaaatatctccctttattggtctcctttccagaatgcacaagatatcagtgcacattaatgtatggctttcatatgtagtttctgggatccagtccacaaagagctaaacgtgcatccaaatgtggtgcctgaacaatcccagctgccccgcagcactgacaccatggggcccataccccatctccatccatgtctggtgtgagcccttcccaagaccatgcccagtgcagcctctatggaaattcacgtcactgagttatagaagaaggatttttttttttttttgagatggagtcttgcggtgtctgctcactgcaagttccgcctcccaggttcatgccatttttctgcctcagcctcccgagtagctgggactacaggcacccgccaccacgcctggctaatttttttgtatttttagtagagacagggtttcaccatgttagccaggatggtctcgatctcctgacctcatgatccacccgcctcagcctcccaaagtgctgggataacaggcgtgagccaccgcgcccggcctagaagatggaatttaagcgaagatgagagggaatgacagaaggcatgggtgagtgcgagcaaacgtgtcacgcaggacgcttcagactcagaaaagactggctactgtaatacctggcttttcagaaagaaaggagacaggataatccacaaggaatatcaagtatatccatgcaaaacaggcactttgtgattttttttaattttctgtatttttatttttttgagacaaagtcttgctctgtcacccaggctggagtaaaatggcgcgatctcacctaaatgcaacctccgcctcctgagttccagcaattctcctgcctcagcctcctgagtagctgggattacaggcatgctccaccatgcatggctaattgttgcatttttagtagagataaggtttcaccatgtaggccaggctggtctcgaactcctgacctcaagtgatccacccacctcaaccccccaaagtcctaggattacaggcatgaggcactgcacccggtggcactttgtgacattaacaagtgaagtgccatttgaacccgggaggcagaagttgcgctgagccgagatcatgcaattgcactccagcctgggtaacagggagagactttctctcaaaaaagaaaagaagaaatgactaacagtgtcagagggctcaattacgatgttacaactacagttaaataacagccaggccatacagcaattctatatatacgcatttcccttagttatctagttcaccatgcataagatataaaacatagaatgtgtactgggaaaattgataaactgggatcagagaaaacattgtataaaacaaattgtacaacaaaaacattaaaaaaatgatgcaggctccctggtctgaatgtttgtattggccaaaagccatgttcagagttcttattctccaataggatgttcctgcagattcggcctttcagataatttgatcatgggtgttgactactcatgaataagaccagtgcctttatttttatttttatttctttatttatttttttgagacggggtctccccctgtcacccaggctggaatgctgtggcaggatctcggctgaatgcaagctctgcctcccagattcacgccattctcctgcctcagactcccgagtagctgggaacacaggcgcctgccaccacgcctggctaattttgtttctgtatttttagtagagatggggtttcaccatgccagccaggatggtcttcatctcctgaccttgtgattcacccgcctcggcctcccaaagtgctgggatcacaggcgtgagccacctcactcagccttatttttatttttttctttttttattttattttattttattttattttattttattttattttattttactttaagttttagggtacatgtgcacattgtgcaggttagttacatatgtatacatgtgccatgctggtgcgctgcacccactaactcgtcatctagcattaggtatctctcccaatgctatccctcccccctcccccctatttttttctttatttttgagaaagagtttcactcttattgcccaggctagagtgcaatggcctgatcttggctcactgtaacctctgcctcctgggttcaagtgattctcctgtctcagcctcctgtgtagctgggatttcaggcatgtgccaccacactcagctaattttgtatttgtagtagagatggggttttaccatgttggccaggctggtctcgaactcctgacctcaggtgatctgcccgtctcggccgcccaaagtactgggattacaggcttgagccaccgcacccggccatccattgttttgtgttcagtagattcgaggattcaccatgttggactgactggtctcaaactcctcgcctcaagcgatctacccccctcagcctcccaaagtgctgggattagaggtgtgagccaccatggccagccagtctaagctgtttctgacaggacagtgaaatgacggagacaggaaaaggagcatgtcatcatcaacatcgctgaaggctgacaactcttattacacaaaggcagtttacagcctgtcatataaaagctgcaatgtgtgaagccatctaatagcactaacttgtttaaaaacctggaggcagctgggaacggtggctcatgcttgtaatcccaacactttggaagaccgcagtgggtggatcacctgaagttgggagtttgagagcagtctgactgacatggaaaaaccccgtctctacttcaaatacaaaattagctgggtgtgttggtgcatgcctgtaatcccagctacttgggagcctcaggcaggagaatagcttgaacctgcgggcagaggctggagtgagctgaggttgcaccactgcagtccagcgtgggcaacaagagcgaaactccatctcaaaaaacaaacaaacaaaaaatctggagaaaaattaacattatttctcaaataagttctcaaataagtacagcaggcccacagtgttcacgtacatgaccccaatttgcacatacagtaagtgagggacaaacttgatcctgggcctgaaggatcccacgacatgtttctaagcacaatagtccaccaagaaagtacagaaaacaaccagtcacaaaaaatacaaggagaacagaaagaagtacatcaagggggatacaaggactgagctgggacacaagcgctgagctgcgctgctgacagtggttctgaagccatccctcatggatcatgtgctgagtcatgatgccctgcacacactgatttaagcagcctcctataattttgtccagtggatgaataaggtcttgacttactcagggagagtagtgttggaggggaggggctcacggggaaattggggtgttcacttttacaaagtcaataggctggtatttgcatccagatcaatgtatcatgtgaggcaaggccaggaaaggaagggcaagggtggagagcaggaagtaatgggcatgtaggagtgaactttgtgcatgcacatctgtgggaatataattccaccaggatagaccaaatcttgagctcggaggaaagtggaactaatttagcaaatggtaaaacattgacccaagcttaaatatgcaaattacaatacaggcaagggacaagaatgaacgagatccaaaaaagcagcagtatggtgacctgaggtgaaagcagttttacgtctcttaaattaaatggcctctgatacctagtttcaagcatatactcaacaatatgccttgtatagattccagaatttcatacacacacacaaaatgagtaaagtctacgaggagtgcagcaatgaaggagaccatggatgtgaagaattccctggctgagtaggtagagatgtgtctgtggaaacagagacagactgagcgcagtggctcatgcctgtaataacaatcataataataatgacaggttttttctgttttctctttttttgagatggagtgtcactctattgctcaggctggagtgcagtggtgtgatctcggctcactgcaacccctgccacccaggtttaagcaattctcttgcctcagcctcccgagtagctgggataacaggcgcctgccaccaggcctggctaaaagtttgtatttatttttgtttttttgtttttttgtttttttttgagacagagtcttggtctgtctcccaggctggagtgcaatggtgcgatctcggctcactgcaagctccacctcccagattcacgccactctcctgcctcagcctcccaagtagctgggactacaggtgcccgccaccacgcccagctaattttttttgtatttttattagagatggggtttcaccgtgttagccaggatggtctcgatctcccgacctcatgatctgcccacctcggcctcccaaagtgctgggattacaggcatgtgccactgctcccatcctaaattttgtatttttagtagatacagggtttccccattttggtcaggctggtcttgaactcctgagcacccgactcagcctcccaaagtgctgggattacaggcataagccaccatgcccagccccttcttactattaactcattattgtgatagttgacaacaatgaaaaatcttaaaatcattacaattattataaaaaataaaacaatgcaaatgttgtgttttctacataaaccatgggcttatccatccacgtattcatgcacacacatcacatcacagtgtaatcccagctactcgagaggctcaggcaaaagaatcgctgtaatccaggaagcggaggctacagtgagaaaatatctcactactgcactccagcctgagtgacagattgaaactgaactaacaaaaaaataagtaaaatcaatgatgtgataaagcatcctgtaccactgatgtgtatcttcactttccattcctttccgagtcattaaaactgcagagacaggccgggcacggtggctcaggcttgtaatcccagcactttgggaggctaaggtgaaaaaacacaaggtcaggagttcctgaccagcctgaccaatatggtgaaatctcatctctactaagaatacagaaaaattagtcaggcaaggtggcacatgcctgtaatcccagccactcgggaggctaaggcagaagaattgcttgaacccaggaggcagatgttgcagtcagctgagatcccatcactgcactccagcttgggcaatagagcgagactccatctcaaaataaataaataaataaaacaattagccgcttgtggtgacacatgcctatcattcaagctctttgggaggctgaagtggggattacttgagccaaggagtttcaggctgctgtaaactctaaattgtgccattgtactccagaactaagctacagagcgacattttctctctctctctccttttttttcttttgagatggagtcttgccctgttgcctaggctggagtgcagtggcacaatcttggcttactgtaacctccacctcccggattcaagtgattctcctgcctcagcctcctgagtggctgagattacaggcatgagccacgacttccagctaatttttgtatttttattagagatgaggttttaccacatgggccaggctggtctcaaactcctgacctcaagtgatccacctgccttggctcccaaagtgctgggattacaggcataagccaccacacccagaccaacatcctgtctactagtgtgccttcaaatgcattaagaaattggatacaaaatgtctccccttattggtctccttttccagaatttaccagatatctgtgcacattaatgtatgtatttcatatgtagtttctctgatctggtccacgaagagctgacatccagacatgacccttgaacaatccaggttgcccagcagcactgacaccatggggcccacaccctgtgtccatccatgtctaggtgtgaggccttcccaggaccatgcccagtggaacctcttctcaagttcatgtcactgggtcacaggagatggaatctcagagcaggtgagaggaactgagggcaggcatgggtgagtgtgagtgaacctgtcaggcaaaatgcttcagactcagaaatgactggctactaaatacctggtgtttcagaaaggaaagagacagattaatccaaagaggaatatcacttcacctgaggaagagccatgcctggctcctttcctttcctcttctgagctgcttcctcatgtaacatgagtctttagaaatcaatcctgtacgtgaaaaaagtatgaaacttcacgtagaaatgactcactcccttcctgtgacaaaaacacacagacaggggagatgtcaccctgtagaaagatggtcctctgaggcccactgcaccagagatcatgcagagataagaaagtcccaccggaagacctacaagtgtatgtttgaccccagtcttcagatctcgcccccctcctggagaagccaccacacacgaggcagcagtggggagctgggctggactgatctcctcttcagggcacacactcatccctgatcaaaccccatccagaggacaacccctcacttctctgtggatcacaggctgagctcagcccccagaaatggaggactcagagcttcgatgctcaatgctgcacacagatgacaagcaactgcgccactgcaggtattactgagggtgggttccatcccatcagaataagaatccctgctaaagcagcacaaaagctctatttgcaaaatgcctctagactctaatgtgaagccagggttgagctccactcagagggggtgagcccagcacagccccacattctggctctgccctccccttggggccttgttctcaccaggatccagacagtggatgacaaaggcacaaaaataatcacacagaacaggcaacgtggacgagaggtggggtgaatgatgggctgtgtgaaaggaaataaatctgtgagcccccaaatcattaagcaaaaggcaaaagtcaagctgggaactgcttagggaaccagactccccttctattcaaagtcacccctctgctccctgatatagatgcatgtctgagtgcctccttcaaaaggctaatcagaaactcaaaagaagggcccagcacagtggctcatgcctgtaatcccagcactgtgggaggctgatgcagtgagctgagatcataccactgcactccagcctgggcaacaaaatgagacttcatctcaaaaaaacaaaacaaaacaaaacaaaaacttaaaagattgcaaccatctgtgcctcatttatctgtgacctggaagtcacctccctgcttgaacctgggagaaggaggttgcagtgaatcgagatctatagggtccagccctttggggcttagtgggtgttctccccatgtgcagagacaagagattgtaataaataaagacagaagacaaagagataaagagaaaacagctgggcccgggggaccactaccatcaagacgtggagaccagcagtggccccaaatggctgggcgcgccgatatttattgcatacaagacaagggggcagggtaaggagggtgaatcttctaagtgattgataaggtgaagcaaatcatgtgatcacaggacagggggcccttccctcttaggtagccgaagcagagagagaaggcagcatacgtcagcgttttcttctatgcacttataagaaagatcaaagacttcaagactttcactattccttctaccgctatctactacgaacttcaaagaggagccaggagtacgggaggagcatgaaagtggacaaggagcatgaccattgaagcacagcaccacagggaggggtttaggcctccggatgactgcgggcaggcctggatactatccagccttccacgagaagctggtggagcagagtgttccctgactcctccaaggaaaggagaccccctttcgtggtcagctaagtaacaggtgccttcccagacactggcgttaccgcttgaccaaggacccctcaagcggcccttatgcgggcgtgacagaggcctcacctcttgccttctaggtcacttctcaccatgtcccttcagcacctgaccctatacctgccggttattcctaggttatattagtaatgcaacaaagagtaatattaaaagctaatgattaataatgtttataataatgattgataattgtccatgatcatctctatatctaatttgtattatgactattcttattctaactattttctctattatactgaaacagtttgtgccttcagtctcttgcctcagcagctgggtgatcctccacccacagagataaagccctgcactacagcctgggcgagaagagccaaactccaacacacacacaaagaaagaatttcagaagtgatgtatcttctcagtcctttcatgtatacatgcaaatttctctttacattacaaattacaacacttacaaataaagtaatttatttcccatatttaaaatacatgctgtcaagttcggctaagtttccggacgtacacagtcaccctcatctgagatgtgcagactgcaagggaatgtgtttgggggtttaggaagtcacttttggacatgtgaaggtggagatgcctgtttgatgtcccagcagagaggtgagcagacaactgcacacaggattgtagagctcagtggagaggcctgcaggggacatgggtaggtgggttaaagctgtgagatgagataaggaaaagcagtgggtgtggacagagacaagaataggttcaagacaatttgagtcaaatctcttgttttttccattccggtatttttgttttttacatttttgtaggacaggaatctattaaaaattcaaattacacctgagcatcaccctctcctaaaggaaaagccacaaactatttgacaaagtatttcaggggtcagtgtcactctgactgagcttttctggtctcattcctcacctgtacattactggttgagtcactgttgtttcgagcaggagatacttcaccaaaagtacaaaaaattagccaggcgtggtggtgtgcatctgtggtctcagccatttaagaactgactggggtggatatttgggcctgggaggcagaggttgcgttaagccaagatcgtgtcactgcatgcaagtatgggtgaccgagtgacaccctgtctcaaaaaaagaaagaaaaaaaaacattccaggacaattttatacacctgagcaaatgaaatgtctctttcaatgtctaaggtcctgatggcatgaatcctaaacatgtaattattttcccagaaaaatgacagtagtacattcaaaatacacacaactgtgaacccctagctataggtgtttaaaacactgaaagagaagcagcattacaaatgagatctgaacaaatgttttcttcttgaacacacgggctttgctggaacaaggttccaagtcaattctgcccatccttgaacatctgcaaaaaatattatggaccagaggaacttgaggggaacgtttacttagcagctcacagctcaccattttatcaggtgacataaagaaagaaaatggaataataggctacttcaactaaattttgatgttagcataaagaaaaagttccttgatatctttatcaagtacacattgaaacaaactaaaatcatttatcaggtaccagaaaatgtttccaatgtatgatacagactagaaagcatgccgtcctcaatgtaaactgaacacaataaatttcagagaaaaacagttttaaaatggttaaaaaatatatctaatgaaatgtggggtcatagaagaatattttgaacacatattatagttgcaaaacaatgatgttacctcataagattatatcaaagcttttttgagaagcagtattttatttattttattttttttattttatttgagacagagtcttgctgtggcccagctggactgcagttgtgcgatctcggctcactgcaacctctgcttccaaaatgaaagccattcttctaccagcctcccgagtagctgtgttacaggcactcgccacaccaagctaattcctacattttagtcaacattgtcttgtcccaacttaaaatgacttatgcatttacaaaacagtgatttctttggggcatcgcccccataaccttttcataaagcattaatgatttcattgttcctctacccaaatttcaccatattcattttttgagacactgtctgtctctgtcacccatgctggagtacagtggcatgatcacggctccctacagcctctaactcccaggctcaagccatcctcccactgcagtctccacagaagctgaaccagcaggcatgtgccaccatgcctagctaatttatgtattttttgtagagaagggggtttcaacattctgcccaggctggtcttgaataccggggctcacgtgacccacctgtctcggcctctgaaagtgcttggattacaggcctgagccactgcatctgctctcatcataaatttgatgtttcttcttgtttcaattttagcaaaatttacactgctttcttttttcaaactcatgtcttccccttctgagtgcctcaaactagaccctgttcagacatgttataacagatttgtgccagtttattttggtgcagaaaatgtgacatcatgtgcaattttcacataatatgtatttttttcatgaacttcttgaagaccccttgtactagcgaactgtattcaagaggatattaaaaggattgtagatatgcaagtgccacttatttctgggatgcaaggatggttcaacatagtcaagcaaatcaatgtgatataccacttgaacacaatgaaagatgaaaaccacatcatctcaatacatggagaaaaagcatttcacaaaagtcaacatcaagtcatcatagaaatcccacacaaaatagatacagaagaaaatttacctcagcaatacaaagaccatccatgaaatgaccacagcagaaataaccaatcagggaaaacggaatgcttttcctgtaggatctcacatgatgcaagaatgctctcaccccttctattcaatcaatactggctgtcctagccagaacaatgaaatagcaaaagaaatcaaactcatccaaatcagaaagaaagaagtcaaattttatttgtttgtagatgacatgaccttctgtaaagaaaatcacaaagagtcagccaaaatgcaactggaactaacaaacacattcagtttatttgcagaatagaataacagcaccaaaaattagttgaatttccatacattaacaataaataattttaaaagaaaattaaaaaccaattccatttgctaaagaacttaaagtaagaaatatttaggaataaacataaaaagtgaggtttgtaccttgaaatctataaacattgatcaaaatgattaaaaacatgtataaatagatataaatcccatactgattggaaaaatgaatatcgctcaatgattatatactcaattgtgatttagattcggtacaatactcatagaagtctctataactttttgttaaagaaacaaaaaacaggccaggcacagtggctcactcctgtaatctcagcactttgggaggtggagtcgggtggatcataaagtcagaagatagagaccattctggctaacacggtgaaacccagtctctactaaaaacacaaaaaattacccaggtgtggtggcacacaactgtagtgtcagctacttgggagactgaggcaggagaattgcttgaacctgggaggaggaggttgcagtgagctgagatcgtgccactgcactccaacctgggcgacagagcaagactccatctcaaaaaaaaaacaagaaaaagaaaataaaggctgggaaaagtagctcccatctgttggctaggctgttctcaaactcgtgagctccagtgacctacctgtctttgcctctcaaagtgctggaattacaggcatgagccatggcccccagtgcaatcctcttaacataaacagtttaatggcaattaatgcttgaaatcaatgttaaatcaacaaactcaggtcaaggctgatttgactctaatgtcaattaatgcttgatggtttgctatactcactgcatttgaaacaactgtctccaaaaggaattgtctgatggtctgcaaggagtgaccttggactgaagacccttccacactgatgacatttgtaagatttctgtccagcatggattctctgatgtctaatgaggtgtgaatgtgaagtaaacgctttgccacaatcatcacacttgtgaggtttctctcctgtatgaatcctcctatgttttgcataggatgaagcttgactgaagaccttgcctcaatcatgacatttataaggtttctctccagcatgagttcaccagtgaaatgcaaggcatgaacgatgtctgaaaaatttgccacatttattacacttgtaagatctcttcactgtggattctccaatgatgtgcaatggttgtagcattactgaaaactttgtgacaatcattacattagtcaagtttccctataccatggattgcttgatggtgaataagtggtgactgcccactaaagggtttgccacactcattgcacttgtaaggtttctctccagtgtgaattctagtatggggtgccacgtgtgaatcattcccgaaagccttgtcacaaaccttacatttctatggcttttctccagtgtgaattctcctatgtatttgaagctggatttgtgaatgaaaactttgtcacattgttcacgtttgtaagatttctatgcagtatgaagtctatgatgacttgcaaggtgtgattgttgattaaaaaccatgtcacattcattgtgcttgtaaggtttctctccactatgaattacaaggtgtgaattttgaccttttaattacaaggtgtgaattttgaccaacggtcttgccacactcattacacttataatgagtttctctccagtgtgaattctagtatgttttgccagatatgcattatatgcaaaaaccttgtcacaaaccttacctctgtatggtttctcttcaatgtgaattttcttatgtgttttaaggtttgatttacaactgaaaacttttgtcacattcctcccatttgtaaggtttctctccagtatgaagtctatggtgatgtgcaaaggttgctttttgattaaaaaccttgccacattcattatgcttgtaaggtttctctccagtatgaattgccttatgacttacagggttgaattgtgatggaaggtcttgccacactcattacactattaaggcttctctccactatgaagcctatgatggtatacaagggatgacatctgactgaaggtcttgccacactcattacacttgtaaggtttctctccagtatgaagcctacgatggattataagcgatgatgtctgaccgaaggtcttgccacactcattacacttgtaaggtttctctccagtatgaactctctgatgttgtgccaggtgtgaatccctctggaaagccttgtcacaaaccttacatttgtatggtttctctccagtatgaatcctcctgtgtctttccaggtttgatttgcgactgaaaactttgcaacattcttcacatttgtaaggtttctctccactatgaatcctcctatgtctttcaaggtgtgatttgcgactgaaaactttgtcacactcttcacatttgtaaggtttctctccagtatgaagtctatgatggcgtgcaagggttgatagtcgattaaaaactttgccacattcattacatgtgtaaggtttctctccagtgtgaagtatagtatgttttgccagatatgaattatatgcgaaagcctcatcacaaaccttacatttgtatggtttctctccagtatgaatcctcttatgtctttcaaggtgtgatttgcgactgaaaactttgtcacattcttcacattcataaggtttctctccagtatgaagcgctttgtgaatgaagagggatgaattatgaccaaaggtcttgccacactcattacacttgtaaggtttctcaccagtgtgacatctacgatggcaggcaaggtatcgcttctgattaaagaccttgccacatacatcacatttacattgtttctcttctaagtgaattatctgatgtttttttaagagtgagctgcaattaaaggatttgaagctctgtatacattcaaaagatttttctctcatgtgtacttcccatttttgtgtgagtaatgaagaatggagggaattatttccatacttattagaaatatgggttttgggcctacaacaaattctttgggatgttgaaactgaggaagcattgttgatagacttctcaacttgattaccaattttcccttcagactgaaatatgtgcggttcaggcagatgcaaatgaaagcttgatccaagctgatctttaatacgcttgtttccagcatgcctttgatcatgttggcctgtactaccagccaactctttgatttctgtcatgggtgctgcatggccatttgtttcatcttctttccactgaaactcgaagccatgaatgtctttctcaatttcatggaaacaaaattctccaatgtgatgacttgcttgtctgtgcaatgtccctgtgtggatcacttctgtattgccttgccctgttgacgacaacgtcttcaacatgcatttggaagagatatctacaaaatttaaacaccaataggtttccaattaagtacagacggtatataatactgaaatgtgtaaatatcacagaaaaaaaacaatacttattttcaacttcccaaacgtgagcttcaaagtttaggaacacaaaaggagtaagattctttaataaataaagggcgattacatgtgcttcaaatcatttctatggaagcctatttccaatatcatgacaaaacactgacagggcacaaacacgtgtgagtctaaagaaaggagtgtttttccactgtgaccctaaagtgtgtcacactgtgcaaaatacatatcactgtcacatcagagaaaaatatatattctccatatttacagcgtatttagggtatacaaataaatgctaaagaaccacacaatatactatattggtaaataatccacaacaagctcttgtaagaataaccaaaattagtggaaattctctattgtcaaacaatcacagcactgacaagataacagaagattacaaaaattagccaggtgtggtggccagcacctgtactcccagctactccagaggctgcgtcacaagtattgcattaagctaaaaggcaaaggttgcagttagctaagattgcatcactccactccagccttggtgcaaaatgagactccatctcaaaaaaaaaaaaaaaaaaaaaaaaaaagacatggcatggtggcttgtgactctaatcccagtaactccggaggccgaggaaggtggatcacctcaggtcaggagttcaaccagcctggccaatgtggtgaaaccccgtcgctactaaagacacaaaaagtagctggtatggtcacaggcacctgtaatcccagctccttgggaggctgaggtatgataatcgcttgaactcgggaggcaaagattgtggtgagttgagattgtgtcactttgctccaccctggacaacagagtgagactctgtctcaaaaaaaaaaaaaaaaaaaaagaaaatgttaataccatatttttctgaataactgttacaaaattacctatatccatgtggaacagttatgttgtgactttttaaaaaattttttgtatttttgtttttttgagatagagtctcactctgtcacccaggctggaatgcgatggcacgatcttggctcactgcaacctccacctcctgggttcatgctagtctcttgccttaggtcctgagcacctgggattacaggcatgtgccaccatgcccagctaatttttgtatttttagtagaaatcaggtttcaccatgttggccaggctggtctcgaactcctgacctcaggtgatccacatgtcttggcctccaaaagtcctgggattacaggtgtgagccactgcaccctgtggcactttctgacattaatggggggagtgtgtccgttatattgcataccacataccgaacactcatatataaattcataaaaatcaattaatcaaatattgcaacccatgataaaacaagcaagaaaataataagtacatttatacagactgaagaattctaaacaattccctcttaagaaaaaagccaaaacttgtacttatcaccagcacacagtgtaagaactgaaatagatgttaagatcactaccttctgatatatgaggtcaagaaaatacacagctttaccaggaacaagaattgactagcggccgggtgcagtggcacatgcctgtaatcccagcattttggtaggctgaggtgggtgaatcatgaagtcaggagttgaagaccagcctggacaacatggcgacacaccatctctactaaaactacaaaaaaatcagccaggcatgaaggaagacgcctgtaatcccagctacttgggaatctgaggcaggaaacatttgaacccaggaggcggaggttgcagtgagacgagatcatgccactgcactccagcctcagtgacaggatgagactttgtctcaaagaaataaaataagataaataactacttctcaaataagctttggtagatgtggtattctctaagaggatgtccctgcagatgcagacattgagagaatttagtcatgggtgttgactactcgtgaataggactagtgcatttataaagggacattaaagaggtccttgcctgttcctctttccaccgtattaggacacagcaggaagatggctgggctaaaccatgaagaatgctctcaccaggaagcaatttggctggcaccttgctcttggatttcccacttcccaaattcattagaaataaatttctgtctcttaagcctgccagtttaagctacatccttttttgtttgtttttgagatggagtcacgctctatcacccaggatgcagtgtagtggcatgattctcctacctcaagtgattctccctcctcagcccagggtctcactctgttgccaagtctggagtgcagtggcatgatcttggctcactgcaacctccacctccagggttctagtgattctcctgcttcaacctcccaagtagctgggattacaggtgcacaccaccatgcacagctaatttttgcatttttagtagagatggggtttcaccatgttggctaggcttgtctctaactcctgacctcaagtgatcaacctgttgcagcctcccaaagtgctgggattagaggggtgagccaccgcggccagccagtctaagctatttctagcaggacagtgaaatgacagagacaggaacaggagcatctcatcatcaacatcaccaagggctgacaaatcttattaaacaaaggaagttaagagtctgtactgtaaaacttgcaatacttgaagccatctactagcactaacatgttttaaaaaccttgagacaggcaaagtgtggtggctcatgccagtaatcccagcattttgggaggctgaggcgggaggatcaccaggtcaggagattgagaccatcctggctaacaagctgaaactccgtctctactaaaaaaatacaaaaaattagcctggcatgttggcactcacctgtagtcccaggtacttggaaggctgaggcaggagaattgcttgaacctgggaagtggaggttgcagtgagcggagatgacaccactgtactttagccgggatgacagaccaaaactctgtctcagagaaaaaaaaaagaaatgaaagaaggctaaagagtaactccaaccaacaagcctatataaagttctccagacagggtgcggtggctcacgcctgtaaacccagcactttgggaggctgaggcgggcggatcaccaggtcaggagatcgagaccatcctggcaaaccaacatggtgaaaccccatctctactaaaaatacaaaaattagctgggtatagtggtgcaggcctgtagtcgcagctactggagaggctgaggaaggagaactgcttgaacccagaaggtggaggttacagtgagctgagatcacaccactgcactccagcccgggcaagagagtgagactccatctcaaaaaactaactaactaactaactaaataaataaagttctccagtaaaggtaaataaaaaaacagtctaggtgtggtcgttcattcctgtaatcccagcactttgggaggatgagtcaggcagataacctgaggttgggagttcgagatcagcctggccaacaaggaaaaaccctgtctctactaaaacacaaaattagatggctgtggtggcgcatgcctgtaatcccagctactcaggaggctgaggcaggagaatcagttgtacccgagacgcagagtttggagtgagctgagatcgcagcattgtacttcagcctgggtgacaagaacaaaactctatctcataaatacataaggtaattaattaataaaaggacagatacagaaactggcatatgtataccttttcttcataactaaacttttttcatattatttgaaataaaaggcatgaaaaacactgtacatatatgttaacggaaatgcaacatacacagaaataattctgacataaataaaaaaattctagtggagaagaagtagtttttgcaggttatggatttttatttttttctgtctcccaggctggagtgcgatggtgtgttatcagctcaccgcaacctctgcctcccggattcaagtgactatcctgcctcagcctcctgagaagctgggattacagccacccaccaccgcacctggctaacttttgtaattttagtagagttgcagttttcacatgttagccaggctggttttgaaatcctgacctcaggtgatctgctcaactcggcctccgaaagtgctaggattacaggtgtcagccactgcacacgttcaggttatggaaattttaagttttgttattatgctataactttaagatgtttaacatacctgcaacaataacctctgcccaaatatctgtacaacacacttcacttctacgtactgaaaggaatggacactaatgttgttatattcacactggaatcatgcttaaaccacttatatgtttacaaagaactaaaagaccaaactatttaaaatagtaacaatggttaggcatggcagcttacatctgtaatctcagcactttgggaatccgaggcaggtggatcacttgagatgaggagtttgagaccagcctgaccaacatggtgaaacccccctctactaaaaacacaaaaattagctgtgcatggtggtgtgcgcctgcagttccagctactcaggaatctggggaacaagaatcctttgagcccgggaggcggaggctgcagttagccaagatcatatcactgcactgtagcctgggtgacagagtgagactctgtcataaaaaaaagaaagaaagaaagtaagagcagagagataagtgggtgcaaagaaagtgtggggaaaagagagttcagattgttactgtgtctatgtagaaaaggaagacataagaaactccattttgatctatattaagaaaaattgtttcgctttgagatgctgttaacctgtaactttagccccaaccctgtgctcacagaaacatgtgctgtattgaatcaaggtttaatggatttagggctgtgcagggtgtgccttgttaacaatatgtttgcaggcagtatgcttggtaaaagtcatgccattctccattctcagttaaccagggacacaatgcactgcggaaagccgcagggacctctgccctagaaagcctgggtattgtccaagtttccccccactgagacagcctgagatatggcctcatgggaaaggaaagaccttacatccccccgcctgacacctgtaaagagcctgtgctgaggaggagtagtgaaagagggaggcctctttgcagttgagataaaaggaaggcttctgtctcctgttcatccctgggaatggaatgtctcggtgtaaagccgaccattcccattcattctcttctgagataggaggaaagcaccccatggctggaggcgagatatgctggcagcaatactgctctgttactctttcctacactgagatgtttgtgtgaagagaaacataaatctagcctacgtgcacatccagacacagtacctttccttgaacttattcatgatacaaattcctttgctcacatgtttccctgctgaccttctccccacctgttgccctgctacactccccttgctaagatagtaaaaataatgatcaataaatactgagggaactcaagagactggcaccgatgcaggttctcgcatgctgagtgtgctagccccatgggcccactgttctttctctaaactttgtctctgtgtcttatttcttttctgagtttctcatcccacctgacgagaaatacccacaggtatggaggggctggcgcccttcagaaagatgtccattcagagatgtgaaaaattaaactttccttttcccacagaattctcccacttgcagagtttcctcacacactatttgaaggtggaacttccactctgcccatctgagctcttacctgcatttacacctgtaatacattcccacccatctggattttttttgctattttcacttcactctccacagtccagggcttttcctttgctccaatatggagataacaggtcagaaagagactcctgcttataaaaagcaaggaccataaagtgctggagctttcgtagagtcccagccctaggtttcagtaggaaagaagacattaccaaaggatctaggaaaacagttcacaaattgctccacctactgcctccttctgaatgctgagggagcactgtaatatgtaatatgtggacatcaagctctcttccaagaatactgagtcaaaagcataggagaagcaaacaggaaactggatatctttaaagtctgccataaggttttgtttttgttttttgagacagagtcttgctctgtcacccaggctggagtgcagcagtgtgttctccactcactgcaaccttggcctcctgggtttaagtgattctctttactcagcctctctaggagctgggattacacgtacgtgccaccacacccagctaatttttgtatttttagtagagaaggggtttctccatgttgatcatgctggtctcgaactcctcacccatagtgatccacatgccttggcctcccaaggtactgggatgacaggtgtgagccaccacgaccaggctgccataaggttttatgcttactttacttctggaacccccactgagctatcatgaagaatgcagaacatctaaacaaaggggacagtgaaagtccagatgctacatcatgaagcttttcatttcaaaatcaatatggcttccattttagtcaaggaacaatggggttcctaagagacaataagagaaaatgcaaaaatacacaagggcacatccccaggagggaagttatcctcacccagggagacgaggttcctataattctccagcatcacgtccctgtataaagtcctctgagcagggtccaggcatttccactcctcctgagagaattctatggccacgtccctgaatgtcaatagaccctgaaatgaaaacacattttaaccaaatggttatgggaggagatcttatctttacaaaaaatgagaggaggagagaggggaaagcatggatttaactgtagagaatgttctgacaaatccaaataagggatttctcactacatgatgtctccccagatgtattttattacactttttgagtattatcaagacatactctcagtataaatttcttatgtttgtgaaaaataacagaaataaacaaataaaaaatcaatgtagggttcctgttataaaaatgtttgaaacttttatagacacaccaagtgacattcattatctagatgagacagagcacaactgatatcttaaaagatgacaacgtccacagtaaaagataggctgggcacagtgacacatgtctgtaatcccagctatgcaggaagctgaggcaggagaatcacttgatcctggaaggcacaggttgcagtgatcccagatcgcatcactgcactccagcctgggcaacagaaactccatctcaaaaaaaaaaaaaaaaaaattagccaggtgtgacggcaagcacctgtggtcccagctacttggaagggtaaagaggtaggatggcttgaccctgagggtggaggttgcagtgagctgcaatcccgccagggcactcaagcctgggcaacaaagcaagaccccgtctcaaaataaaataaaataaatgaaaacaaaattactcaaagtacaaaaatcaatcgtgtatatatatgttcacaaaataataaaacctacagagactcacaaaacactagatgtgaatacaaagggttgtcatttgtcccagattttcaaaatacaaaagattttcaaaatatatacatatgtgtatatatgtatttatatgtatatgtgtgtgcatgtgtgtggggatgtgtatgtacatatataaagtttttaaaaatataaaaagtagcaagttttgtttaatgaaagaggaatctcatcttgctggaaaaggatactttggcagttgtgggcagggggaatcttgtcagatctaagaatatggaaatgccccatcctagaagcagtaatcaccctttcaactgcctgacctggaggaatcttcagatatctgtagtaatgcgggtgtgcacagaggcagccactatggcactctttatacagggaaaaatcgcaaaggacccacgtgttgtcattcagccaatttccaatgcagatgtcaaaaagcaagctagccatgttcactaacatgacaacatgtaaattcacaattagcaaaatcaaatatcaaagtaaaatatttactgggacacaaagaagaaaacaacagacactgcagtctacttgagggtggagcggggaggaaggagaggagcacaaaaaataactattatgggccgggcgcggtggctcacgcctgtaatcccagcactttgggaggccgaggtgggcggatcacgaggtcaggagatcgagaccatcctggctaacacggtgaaaccccatctctactaaaaatacaaaaaattagccgggcgtggtggcgggcgcctgtagtcccagctactcgggaggctgaggcaggagaatggcgtgaacccgggaggtggagcttgcagtgagccgagatcgcgccactgcactccagcctgggcgacagagcgagactccgtcttgaaaataaaaataataataaatatatatatatatacacacacacatcatgtgatgataaatataacaatatatatttaataataattggtggggctgggtatggtgactcgtgtctgtaatcccagaattctgtgcgactgaagcagacagatcacctgaggtcgggagttcaagaccagcatggccaaaatggtgaaacactgtctcttctaaaaatacaaaaaaaattagccacgggtgatggcacgtgactataatcccagctacctgaaaggctaaaacaggagaatcactggaacttgggaggcagaggttgcagtgatctgagatcgtgccactgcactccagcctgggcaactgagaatttgtctcaaaaagaaacaaacaaacaaaaaagctgggtgaggtggctcacgcctgtactttcaacactttaggaggctgaggtgggcatatcacgaggttaggaaatggaaaccatcttggctaaaaaggtgaaaccctgtcgctactgaaaataccaaaaaattattcaggtgtggtggcactcgcctgtattcccagctactcaggagcctgaggcaggaaaactgcttgaactgggaaggcagaggttgcagtgagccgagaacaccactgaactccagcctgggctgcagagcaagatttcgctcaaaaaataaaaattaaaattaatcaggcatggtggcacccacctgtggtccctgctacctcagaggcagaggtcaggatggcttcttgagcctgagggtggaggttgcagtgcgctaagatcacgccactgcactccagcctgggcaacagagtgagaccttctctcaaaatgaaataaaatatatgaaaacagaattactcaaagtacaaaaatctgttttgtatatatatgcccaaaaaataataaaacctacacagactcacaagaaattagatgttaagaaaaagggttgtcattttccccagattttcaaaatatatgtgtttgtatatatgcatgtatatgtatagatgtgtgtgtatgtatgtatgtatatatttatttatatataaaggttttaaaaatacaaaagtagcaagatttgtttaactgaagaggaatctcgccttgggggaaaggatactttggcagtgggaggaaagagaggagcagaaaaaataactatcgggcccgggcacagtggctcacacttgtaatctcagcactttgggaggctgaggcaggtggatcacctgaggacaggaattcaacaccagcctggccaacatggtgaaactctgtctttactaaaaatacaaaaattagccaggcatggtggctggcacctgtaatcccagctacttgagagtctgaggcaggagactcacttgaacccaggaggcagaggtttcagtgagccgagatcatgccattatactccaacctgggcaacaagagcaaaactcagtctcaaaaaaataaatttttacaaaaataacagccaggcatggtggctcacgcctgtaatctcaacacttttggaggttgaggcaggtggatcacgaggtcaggcattcaataccaacctggccaaggtggtgaaacaccgtctctagtaaaaatacaaaaaaaattagctgggcatggtggcgggtgcctgcaatcccagctattcaggaggctgaggcagagaaatgcttgaacccaagaggcggatgttgcagtgagccgagatcacaccactgcactccagcctgggtgacagagtgagactccatctcaaaaaaaataaataaagcaaataaaacaaaaataactattgggtactggacttgataccggagtgatgaaataattggtacaacaaactccaatgacgtgagtttacctctgtaacaagccttcacacatagccccaaaagtaaagtaaaaaaatatataaaatttttttttaatttacaatggaatttttttttttaagatggagtcttcctctgttgcccaggctggagtgcagtggtgcaatctcagctcactgcaagctctgcctccgaggttcaagtcattctcctgcctcagcctcccaagtagctgggactacaggtgcccaccaccacacccggctaattttttgtattttttaatagagacagggtttcaccatgttagccaggatgatcttgatctcctgaccttgtgatccacccacctcagcctcccaaagtgctgggattacaggtgtgagccaccgcgcgtggcccagaattttttttaaagtctcataacgatgcagaaatacacgtgtacgagacttgctctgacagctaacacagaactgacaggagtggctccccagtgaggctggaaggagggtggaggatgtgacagggaaaggagatgtcttatggccaagggtctaagctgcagctttgcttggagttttaccacaaaacaaatatatatatcatgtgatggtgaaatataaccatttatatttaataataactggtggggctgggcatgatggcttgcgcttgtaatcccaacacactggggggccgaggcgggcagaccacctgaggttaggaggttgaggccagcctggccagcatgctgaaacgctgtttctactaaaaatacaaaaaaattagctgggcgtggtggtgcacacctataaccccagctactaggtgggctgaggcaggagaatcacttgaacccaggaggcggaggttgcggtgagttgagatcgcgccattgcactccagcctgggtaacagagcgaaactccatctcaaaaaataataataatgaaggaatgattcatgaattattcatgtctatgtatgaactttccattctaattagtaagatttttggagtcagaaacacagtaactcactccattacctaaaaatgtggtataaaatcagggagaaaagattttcccttattggtctccttttctagaacttaccacgtacttcgtgcatattaatacgtgactcccattggcagctgctccaatcctggtccacagtgagctgacagtgcatccagatgtggcccctgaacaatccctgctgcccaagagcactgacaccacaggaccctcaccccgtgtccatccatgtcggggtgtgagcccttcccaggacctgcccagtgcagcctcttcccaagttcatgacactgggtcacgagagacggaacctaagcgagatgagagggactgaaggaaggcataagtgagggtgagcaaacatgtcaggcaggtcattcagacccagacattcccaactccaaggcccagggtatctgaaaggaaggagacagaacaatccaccgaggatatcatctcacctgaggaagagccatccctgactcctttgctttcctcttcctcttctgggtttctttctcacgtaccaacagtctttagaagtcaatcctgaatgttaaaaatatgttgtttatcactcagaatcaacacaccccctcccttaacacaatgacacaaacataggagacctcaccctgggaaatacggtcccctctgctgcccactgcacaatgaacaaaaaattcctacaggaaaactcccactctcctcctggagaagcccacacacacgctgcagcagtggggagctgggctgggatgagctccccttcaggaaatctctaccaaaaatacaaaaacttagccaggtatggtggtacgcatctgtgtgtctgtggtcccagctacttaggaagctgatgtggaagcatcatttgagctcaaaagtttgagactagcctggccaacatggtgaaagcctgtctctactaaaaatacaaaaattgggccgggcacattggctcatgcctgtaatactagcactctgaaaggccaaggtgggtggattacttgaggtcaggagttcaagagcagcctggccaacatggtgacaccctgtctctactaaaaatacaaaaagtagccgagattggtgggtatctctaatcccagctactcgggaggctgaggtaggagaactgcttgaacctgcgcgacccgagatcgcgccactgcactcctgcctgggtgacagagtaagactcaaaaataaaataaaatacaaatacaaaattagcagggtgtggtggcacacacctgtaatcttagctacttgggaggctgaggcacaagaattgcttgaacccaggagatacaggttgcagtgagccaagatcacaagactgcactcacagcccggaggacagagtgagagtctgtttgaaaaaaaaaaaaaaagtgcatttctgatgggattgacacagagataagaagacttgagtaatgccatagacactgatgggtagagggaacttcagatgggggtgggagggcatgggagacagctctgagcctagacctgaaggagaaagggacagtgccatcttcatttagaaacattgaataagagcagggacaacaacctgagacaggaaggattttgatgtttgaaaaaagagaaaagcaaatgtgactggggcagagggagtcagatgagggtaagctcccaggaggaggctggacactggcagggaccctgaacacagggctgtggagccaaagtgaagagtcgggcttttgtcctggggaacacgggaagcaggtggagggttccctgccaggcactgacatgacctgctttagatgtagctgtgatattctaatacagacaaaggcctccaaagatcctctctgtttctgagtctaccgctctgtttcttccattcttctgcttttttttttttcatttttggggtactgcatcccactgaaaattctaattacaactgggcactctcctctaccagaaaaaaagccacacccagacaccgcctctattttgccaatcatttcaggggtcaggatcactcaggttgagcttttctggtctagcccttcgtcgcaaagatgcagggaggttcactggggctcagagctggaaacattttcacgaagttaccctgagaaggtctgagatgagtgagaaggtgtgcctgaattcttacatgggggcctggaagggctaatgggatgggttggtcttatcatcccattcttaaaattagagaagcatttttcacatgcctgggttaaagaaaattcttttgaaaggttctgatgaaattgactcccaacattgaattcttccttacaagaaaatcacactaacatttataaaatgcagcagtgtaaacacacagctcttgaccttgaaaacagggaaacagggtcagctgtagaaccaagacataagcaaattatttcaatcaagaaatacatgggtggacagctgaggtggttcacacctgtaattccagcactttgggaggtggaggtgggtggattacctgaggtcaggagtttgagaccaacctggccaacatggtgaaaccctatctctactagaaatacaaaaattagctgggctccatccttgcaacttatttaacctcctgttggtccttctccccaatctttagatcgtcctcaatctccatagatttctgcctcttctcccatctatgcgcctcctctgctctccctgttaaattctctcttctctgttataaccccctggacccaatctggcaccccagatccccaggtgtcctccccgctgtgcttctccctctgttctccttgccaccagcaccactctgctctgtctgacccggctccacatccctcctcctctccctcactctgatgagcctccacatttctgcccctctccctaccttgctgtccttcatctctctgtacatctagcttttctctacatttctccagttgcttttctcctcctgctttcttatcttttatcacttttgctgtctcttggcaaatccctcacccatcctctactttgccatctgttatgggtctttctcattcttcttttctctgtctcaggttttctactgctctctcagtccctctctctgtctcctgatccctttggcccacacgatcacaagagggtttggagtaagacgcctgcatctcggagaagcgcattttccaagtgctggagctgggcgggcaagaacaccccgcgtcacaggacaagccccaggcacctctccaacgagggctcaggggacgcggtgactgcggaggggagatctggggagcagcagggcccagcaagaggaggagggaggtggggagcgacgacgccttcggacaagggtgggatccgcaggatcccaggaccacagaacgcagccttcccgggactggggtcgccgcgctgtgctccaggaacccaggagagtaaggctgggaggcgcacagggtgggaatacacctctagggtgaggactttaaaaagagccgtgcggaaggagtcaaaaaacggttttgagcaggaaaactacgcgataggaaacgtatacattgccctatggcagaaagacccgggacgggaccagcctcagggcgactttaaacctaaaaagaaggggcttccggactcccagtagaacatctccatttgctctgagtgaaggaagaaaggcgagaacttccaggtctatggggaccccacatcccatgtacagaagtgccggggacctgggaagctcagacttaacaccacacagagcaaaactcaccgcccgccgcggcgtgaccgtcattccacgggatccacttcctggtctgcgcgaatctgcgcgcgcaggacagaaaccaggcctgggtggagccaacgaggaggcgagcggggcccgggtgaggtgtgggcggggcgcgaagcggcgagaccttgccctttagaacccgcagagggcggggccggagcgggacctgtgcatctctcagcctcctcccaacccgttctccgggttttggcggcgagagcccccaggaaggcagacggataattcaaaagccctggaatagtctggaaggaggatgcaaactagaatgtaaaatgcaaagccctttctgggcggaacgtaggatttcatgctgatggcccacaggacagtatagaaatcttctccctttctattctccattcactcaggagggagagtccacccagtgctcagcttcagagacatccctagggccacagcctgggatgccagacggagtgctcaggccagggaggagtgaggtcaccacctgctgcttaaacacagcagggatgcgggcgtgggagcctgaggtcccagctactcaggaagcagcggcgggaggatcgctcagcctgggggtccaggacagcctgcgcgacaatgtaacattccctcccgcagtctctctcttttttaaatttttaaaataaaatttttattaggccgggcacggtgactcacgcctgtaatcccagcactttgggaggctgaggcgggcggatcacgaggtcaggagatcgcgaccatcctggcttacacgatgaaaccccgtctccactaaaaatacaaaaattagccgggcgtggtggcgggcgcctgtagtcccagctactcaggaggctgaggcaggagaatgcggtgaacatgggaggtggagcttgcagtgggccgagaccgagccactgcactccagcctgggcgacagagccagactccctctctaaaaataaataaacaaactaaatttgcttgtgtgagataggaatacaacattactcttctccatatggatatccagttagttgtcccagcacatttgtaaaagagatctgttactttctcctttttatttacattttttctttttcttcttcttcttctttttttttttttttttgagactgagtatttctctgtcgcccaggctggagtacaatggtgacatctcggctcactgcagcctctgcctcctgggttgaagcgattcttctgcctcagcctccggagtagctggcattacaggcacacccaccatgcccggctaatttttgtattttgggtacagacggggtttcatcatgttggacaggctggtctcgaactcctgacttcaagtgatccgcctgcctcggcctcccgaagttctgggattacaggcgtgagccactgtgcctggcccaagaaatactctttacttcgctttttaaatgttgaaaaaatacaattgaaaactaaaaaatcttccccaaaatgagaaatcatcttcatgacaaaacaggaagaaataaaaaccattttattagtaaataagccttagaccagaatgtgttgggaaatacaggcaaagagctgagaggttgaaaagagagaaacttcactgctctatacaacccattaagtacatgttttcaagataaacactaatcagtcctcagggaagaggacttgacaagtctttggtcgcacatagttcatcctggctctacttggtaatggaggtgaccatctgtgtcagctaactagcttcatgcagaaggaggggaaatacattaacccacgtctttttgacaagtgtgagttttacgacatggcgacaggtgccctctctagtgaggctcctacaatctgacggaaactgacgtcagcagtaaataataaaattcagaatacacgattaattatagagtttattggaacacaaagtttgaggatagccatctggaaacatcaactccaaatgaagggggcccgtgttcccatgtagagatgttaaggtttcacacacagggaaagacagagaagctttagcagaatcaacacattttccattcaagaccagtgcataggctgcggcagcttgactggtgatggattgatacacttcaaggaaggttactttatcactccgtaagaagggacaatgatgccaaaaggtcttatctctggggctgggtagtcttcctacttacaggtaaactgtttttttttaaattgatattaggaaactaaattttattgcactacacgctaccagttacaaagtagggtgtcctcataaacaaaggaaatgcctcctctttaagtttttctttcttttttttttttttttgagacggtgtatcgctctgtcacccaggctggaatgcagtggcgcaatatccgctcactgcaagctccgcctcccgggttcacgccattctcctgcctcagcctccagagtagctgggactacaggcgcccgccaccacgcccggctaatttttggaatttttagtagagacggggtttcaccgtgttagccaggatggtctcgatctcctgaccttgtgatgctcccgcctcggcctcccaaagtgctgggattacaggcgtgagccactgcacctggcctgtttttcttacataggcgcctaggtaaaaactaagatatgtctacctgccggtctgctgacagtctaacaaaacttattattttgttgatttaaagctatccttaggcggtcccggtggctcactcctgcaatactagcaatttgaaaggctgtaccagggggatcacctgaggtaaggagttccagaccagtctggacaacatggtgaaagccagtctttactgaaaatgcaacaattagccaggcctgggggcacatgtctgtaatcctagctcctcaggatgctgaggaagtagaatcgcttgaacttgggaggcgggggttgcagtgagccaagattgtgccattgcactccagcctggatgacaagagtgaaacggcatcaaaaaaaaaaaaagaaaaagaaaaaaaagctattcttggtattttagtgtgcaagtacttgaaagcatgactgtaattattttagaagcatagattgtcatgggatattgagtcatctggacattgtttttctgtaggagtttgttcttgcaggtactattaagctgctttccttaactgtaaacatcttaagatcatgactcatgcgtgagcagtaaggactacgtcttgctagttttagtagactaaaactttgtcattctagctctcctaggatcctgtttaacagtttttccactcatgcaccacagcgttctaagcacaattatggagacaccactcttttgtaatgcactgacaccatgtcactgcactttagtctgggcgacagagtgagattccgtcaaaaacaaacaaacaaacaaacaaacaaaacaaaaacgaaaactcatccaaatcagaaagaaagaaataaaattgtatttgtttgtagatgacatgatcttctgtggaaaaaatccaaagagtcaaccaaaatactactggaactaataaacacattcagtggatttgcagaatacaatatcagcagcaaaaattagttgaatttccatacattaacaataaacaattttaaaagaaaattaagaaaaccgttccatttgctagagaaatttaagtaagaaatactaaggaataaatgtaaagaggtgagacgtttgtaccttgaaatccacaaacactgatcaaaatgattaaaaacatatataaatagagatagaacccatattgatggattggaaaaattaatattgctaaatgattatataacctaatgtgatttagattcaacacggtacccataaaaatccctatcagattgtgttaaagaaacaaaaaactggctgggaaaagtggcacacgtctgttggccaggctgatctcaaactcctgacctcaagggatctaactgccttggcctcccaaagtgctgggattacaggcatgagccaccgtgcctggcccaatcctcttaacataaacactttaacatcaattaatgcttgaactcaatgttaaatcaactcaaactcaagtcaatgctgaattgactctaatgacaattaatgcttgatggtttgctatactcattgcctgtgcatcaattatctcaaaaatgaattttctgatgttctgcaaggagtgacctcagactgaaaccttgtcacacttatgacatttgtaagatttctgtccagtagggattctctgatgcctaatgacttgtgaacgtgaagtaaagactttgccataattatcacacctgtgaggtttctctcctgtatgaattctcctatgttttgcctaggatgaagcttgactgaagaccttgcctcaatcatgacatttgtaaggtttctctccagtatgagttcgctgatgaactgcaagttatgaacgatgtctgaaaactttgccacatttattaacacttgtaagatctctcttcattacggattctccaatgatttgcaacagttctagcattaccaaaggcattgtgacaatcattgcattagtaaactttccctacaccatggattgcctgatggatggtgagtaagtggtgattgcccactaaaggctttgccacactcattacacttgtaaggtttctctccagggtgaattctagtatgtcctgcaaggtgtgaatcacacccaaaatccttatcacaaaccttacatttgtatggtttctctccagtatgaattcacctatgtctttcaagctgtgatttacgactgaaaactttgtcacaggtttttctccagtatgagttcactgatgaactgcaaggtatgaatgatgactgtaaaattggccacatttatcacacttgtaagatctctcttcattataggttctccaatgatttgcaagtgttgtagttttactggagactttgtggcagtcattacatctgtgagctttcactataccatggattgcttgatggtgaataggcgatgccctcaccctaaaggctttgccacactcattacacttgtaaggtttctctccagtgtgaatttcagtatgttctgcaaggagtgaattgagcccaaaaaccttttcacaaaccttacatttgtatggcttctccagtgtgaattctcctatgcattgcaaggtgtgatctgcaactgaaaacgttgtcacattctttacatttgtaaggtttctctccagtatgaattgccttgtgaacaaaattacaacaaattagctgggtatggtggattccgcctgtagtctcagctgttctggaccctgaggcaggggaattgcttgaacccaaggcagagattgcagtgagctgagatcgcactgctgaaaagacacaaacaagttgaaagccactgtgactcggctcattgcaaactgcctcctgggctcaagcgattctcctgcctcaacctttcgagtagctgggactgcaggtgcacaccaccatgcctggctaagttttgtatttttagtagagacagggttttgtgatgctggccagactggtctcgaactccttactgcaaaaaaatgaatatataatacatagaagtatatgtatttctatgaaatatataacacatagaaatgaataagttgaaagcctctgtgtcttaaacaaatgacagtagaactaaaatatgggaaggtcgggcatggtggttcacacctgtaatcccagcactttggaagtccaaggcaggtggatcacgaggtcaggagttcaagaccattgtggccaacatggtgaaaacctgtctctactaaaaatacaaaaattagctgggcatggtggcatgtgcctgcaatcccagctactcaggagactgaggcaggagaattgcttgaactgggacctgggaggcagaggttgcagtgagccgagatggtgccactgcactccagcctgggctacagagcaagactccatctcaaaaaaggaaaaaaaaaaaaaaagaactaaaatatgggaatctcattcaacctcacaagctccctcaataagaatgatgaaaagtgtaactgttacagggttgatcccacaacaaactgaacaaagcttttcttgttaaaaatgaacaatgccaggtgcggtggctcaagcctgtaatcccagcactttagaggccgaggcgggtgggtatggaggtcaggagttcgagacgagcctggccaacatggcaaaaccctatctccactaaagatacaaaataacatgctgggcatggtggcacgtgcctggaatcccagctgtgtacatcaaaagcacgtatggggcaaaatcacaaaagagaatacaaaaccaggaaaagccaagatacacaaggacagattcttcatgtctggaggaacattttcctcacccacagactccaggttcctgtagttctcccacatcacagccctgtataaagcgttctgtgcagggtccaggcgtttccactccagcaaagagaactctatagccacatctctgaaagtcaagtatccctaaaatgagaaacacgtttaaataaaacattatggaggcgttatcaccttcacacgaaatgagaaatgggaaattaagtatcgattgggccaaagaatatgttctgacaaacccgtattaaggtatttttgaacatcttttctctatcgttgcattttattgtacttttccatgagagatttcaagatcccctaagtaaaaaatttacaaataaaaactaaatatagtgttttctctataaatacgttagatattatgttcagcctaacacttgatattcattatctggatgagctaaaatacaagtgcagtctcagagatgacaaagtccagtggcctaaagaaaagaaagtcagggccagccatagtggctcaagcgtgtaatcccagcacgttgagaagtggagggaggcagatcacaaggtcaagagtttgagatcagcctgaacaacatggtgaaaactcctcttctcccaggaggcagaggatgcagtgagccaagataacatcagtgcactatagctggagcaacagagagacactccatctcaataaaataaaaataaaaattggccaggtgcggtggctcacgctttcaatctcagcactttgggaggccgaggcaggcagatcatgatgtcaggagatcgagaccatcctggctaacacagtgaaatcccgtctctactaaaagtacaaaaaattagccaggcgtggtggcaggcacctgtagtcccagctactcaggaggctgaggcagaagaatggtgtgaacctgggaggtagagcttgcagtgagccgagatcgggccactacacgccagcctgggtgatagagcgagactccttctcaaaaataaaaaataaaatttttaaaaaggtggggcacagtggctcatgcctgcaatcctggcactttgggaggcagaggtgggcagatcacctgaggtcaggagttggagaccagcctggtcaaagtgatgaaacaacgtcgctactaaaaatacaaaaatgagctgggtgtggtcgtgggcacctgtaatcccagctactggggagcctgaggcagaagaatcgcttgaacccagaaggcagaggttgcagcaagctgagatcgtgctactggactccagactgggtgagaagaacggtaccccatttcaaatatatatatatggtctggagggacattttcctcacccacagactccaggttcctgtagttctcccaaatcacggccctgtataaagcgttctgtgcagggtccaggctttatatatatatatatatgtaatacatatatatatattacatatatatataatacatatatattatacatatatatttatatattatacatatatatttatatatgattatacatatatatttatatgatcatacatatatatttatatgattatacatatatttatatatgagattatacatatatatttatatatgattatacatatatatttatatatgattatacatatatattatatgattatacatatatattatacatatatttatatatgattatacacatatttatatatatgattatacacatatatttatatatatgattatacacatatatttatatatatgattatacacatatatttatatatatgattatacacatatatttatatatgattatacacatatatttatatattatacatatatatttatatattatacatatatttatatatatgattatacacatatatttatatatgattatacacatatatttatatattatacatatatatttatatattatacatatatttatatatatgattatacatatatatttatatattatacatatttatatatatgattatacatatatatgattatacatatatttatatatatgattatacatatatttatatatgtatgattatacatatatttatatatgtatgattatacatatatttatatatgtatgattatacatatatttatatatatgattatacatatatttatatatatgattatacatatatttatatatatgattatacatatatatatatataaaatcataaggctggatgcagttactcatgcgctgggtgcagtgactcatgcctgtaatcccagcaatctgggaggccgaggtgggcagatcacctgaggtcagaactgtgaaacccctcctgcaggaaccctccacatacatgtagtgaagtcaacacactcagaggcagccagggtggcattcttggtaacggtgaaaaactgggaaggactcacacgtcttcattcagaaaatgctccaaggaggatgaaaaacagcaaactatcttgtttcctaccttgaaaatgtggaacattttaacacttgcaggataaaataccagaacaaaacatttatcatgtcgagctctttggctcacgcatgtaatcccagtactttgggaggccaaggagggaggatcacttgaggccaggagtttgagaccagcctggccaatatggagaaacgccatctctactaaaaatataaccattagccaagcatgatggcacatacctgtaatgcagctactcagttggccgaggctagaaaatcatttgaacccatgaagcagaggttgcaatgtgctagtaagttccagcctgttgacagggtgagacacctgtctcacaaaacatacaaaaaaaaaaaaaaaaaaaaagaaaagaaatgactaacagtgtcagacggctgaattatgatgtcacgactacagttaaataacagtcaggcaatacggcaattctatatacacatattgcccttagttatctagttcactatgcgtaagatataaaacatagaatgtgtactgggaaaattgataaactgggatcagagaaaacatagtataaaacaaatcgtataataaaaacataaaaaaagatgcaggctccctggtctggatgttcatattggccaaaagccatgtttggatttaattaattaattaattaattaatttatttatttatgtatttattttttgagatggagtctcactctgttgccaggctggagtgcagtggcatggtctcggctcactgccacctctgcctcctgggttcaagtgattctcctgcctcagcctcccaagtagctgggattaccggtacgtgccaccacccccagctaatatttgtatttttagtatagacggggtttcaccatgttggccaggctggtcttgaactcctgacctcatgatccacttgccttggcctcccaaagtgctgggattacaggcatgagccaccgtgcccagcccatatttggatttcttattctccaacaggatgttcctgcagatgtggcatttgagataatttggtcatgggtgttgactactcatgaataggaccagtgcttttatttttattttttttctttctttatttttgagaaagagtttcactcttgttgcccctgctagagtgcagtggcctgatcttggctcacagaaacatccgcctcctgggttcaagtgattctcctgtatcagcctcccgtgtagctgggatttcaggcatgtgccaccacacccagctaatttttgtatttgtagttgagatgaggttttaccatgttggccaggctggtctcgaagtcctgacctcaggtgatctgcccgtctcggccgcccaaagtactgggattacaggcttgagccaccgcacccggccattttttttgttcagtagattcaaggattcagcatgttggactgactggtctcaaactcctcacctcaagcaatctacccccatcagcctcccaaagtgctgggattagaggtgtgagccaccatggccagccagtctacgccgtttctgacaggacagtgaaatgacggagacaggaaaaggagcatgtcatcatcaacattgctgaaggctgacaactcttattacacaaaggcagtttacagcctgtcatataaaagctgcaatgtgtgaagccatctaatagcactaacttgtttaaaaacctggaggcatccaggcgcagtggctcacgcttgtaatcccaacactttggaagaccgcggtgggtggatcacctgaggtcgggagttcgagagcagtctgactgacatggaaaaaccctgtctctacttcaaatacaaaattagctgggtgtggtggtacatgcctgtaatcccagctacttgggagcctcaggcaggagaatcgctcgaacccccggggcggaggttgtggtgagctcggattgcgccactgtagtccagcctgggcaagaagagcgaaactctgtcaaaaaaaaaaaaaaatctggaggcaaattaacattatttctcaaataagttctcaaataagtacagcaggcccacagtgttcatgtacatgaccccaatttgcacatacagtaagtgagggacaaacttgattcttggcctgaaggatcccacgacatgtttctaagcaaaatagtccaccaagaaagtacagaaaacaaccagtcacaaaaaatgctgcaaggagaacagaatgaaatactacaagggggatacaagcaagggctgagctgggacacaagcgctgagctgcgctgctgacagtggttctgaagccatccctcatggatcatgtgctgagtcatgatgccctgcacacactgatttaggcagcctccaataattttgtccagtggatgaataaggtcttgacttactcagtgagagtagtgttggaggggaggggctcacggggaaattggggtgttcacttttacaaagtcaataggctggtatttgcatccagatcaatgtatcatgtgaggcaaggccaggaaaggaagggcaagggtggagagcaggaagtaatgggcatgtaggagtgaactttgtgcatgcacctctgtgggaatataattccactaggatagaccaaatcttgagcttggaagaaagtggaactaatttagcaaatggtaaaatattgacccaaggttaaatatgcaaattacaatatgggcaagggacaagaatgaaagagatccaaaaaagcagcagtatggtggcctaaggtgaaagcagttttacatctcttaaattaaatggcctctgatacctagtttcaagagtatacacaacaatataccaagtatagattccagaatttcatacacacagaaaaaaatgagtaaagtctatgaggagtgcagcagcgaaggagaccatggatgtgaagaattccctggctgagtaggtagagctgtgtttgtgaaaacagagacagactgagcgcagtggctcatgcctgtaataacaataataataataatgacaggttttttttctttttttgagatggagtgtcactcttttgcccaggctggagtgtagtggtgtgatctcggctcactgcaacccctgccacccaggttcaagcaattctcttgcctcagcctcctgagtagctgggataacaggtgcctgccaccgggcctggctaaattttctatttatttatttatgtatttatagagacagagtcttcctctctcacccaggctggaatgcaatggtgcgatctcggcacactgcaacttccgtctaatggtttcacgccattctcctgcctcagcctcctgagtagctgggactacaggcacccgccaccacatctggctaatgttttttgtatttcattagagatggggtttcaccgtgttagccaggatggtctcgatctcctgacctcgtgatccacccgcctcagcctcccaaagtgctgggattacaggtgtcagccacagcgcccatcctaaattttgtatttttagtagagacagggtttcaccattttgatcaggctggtcttgaactcctgagaacctgcctcagcctcccaaagtgctgggattacaggcatcagccaccatgcccaggcccttcttactattaactcattattgtgatagttgatgacaatgaaaaatacttaaaatagccaggtgcggtggctcacacctgtaaacccagcactttgtgaggccgaggtggatggatcacgaggtcaggagatcaagaccatcctggctaacacggtgaaacctcgtctctactaaaaatacaaaaattagctgggcatggtggcaggcacctgtagtcacagctactcaggaggctgaggcaggagaatggtgtgaacctggaggcggagcttgcagtgagccaagatcgggccactacactccagcctgggcaacagagccagactccgtctcaaaaaaaaaaaaaaaaaagaaaaatacttaagatcattacaattattataaaaaataaaacttatggcaaatgttgtgttttctacataaaccataggtttatccatccatgtatttatgcacacacatcacatcatgccattacacgtgtggtggtgcacacctctagtcccagctactcgaggtgctcaggcaaaagaatcactgtaatccaggaggcagaggctacagtgagcctaaatctcactactgtactccagcctgggcaacagagggagactcaactaaaaaaaataaaatacaatcaatgatgtgataaagcattctacaccactgatgtgtatcttcactttccattccattccaagtcattaaaaatgcagagtctagcctggcatggtggctcaggcctgtaatcccagcactttgggaggctgaggtgaaaaaacacaaggtcaggatttcccgaccagcctgaccaatatggtgaaatcccatctctactaagaatacaaaaaaattagccaggcatggtggcacatgcctgtaatcccagctactcgggaggctgaggcaggagaattgcttgaacccaggaagcagatgttgcagtcagctgacagcctgtcactgcactccagtttgggcaatagagcgagactccatctcaaaataaataaataaataaaacaattagccgcttgtggtgacacatgcctatcattcaagctctttgggaggctaaagtggggattgattgagcccaggagtttcaggctgctgtaaactctaaattgtgccattgtactccaaaactaagccacagagcgatattttctcccactctctctccaacatggtgaaaccccatctctaccaaaaatacaaaaaattagccaggcatcctggcacacatctatggtcctagctacttgggaggctgatgcaataagatcacttgagcctgggacacagaggttacagtgatccaagactttaccactgcattccaccctaagtgacagagtgacactccacttcggaaaaaaaaaattccaaaaccatcttgtatattcctgagcaaaagaaacttctttcgaggtctacggttctgatggcatcaatcccaaacatgtaattactcactcccagaaaatcacagaaatatgttcaaaatgtacacattgtgaacacatagctgcaggtgtttaaaacactgaaaaattgtgcacacatagctctaggtgcttaaaacactgaaaaagaggcagctgtagcaatgagatctgagcaaatgcttttctcatgaacacatgggctctgctaaaccaaggttccaagtcaatccagcccatccttcaacatctgcagagaatattatggaccagagggatttaaattaattatgttacaaagagaggaagcaacacgtcatcacttcatcatcacatccaatcaactcaccgctcatctgcacccagggtcccccttcgtcttcattactgtttccctccatcattctgtacatagctctcattctcaccttctctgaaattgggattagccaggtgtggtagcacctgcctgtcatcctggctccttgagaggctaatgtgggtatcacttgagcccacgaatttgaggctgctgtaaactagaattgttccattgcactccagaaagggccccaaagtgacaccctctttcttaaaaaagaaagtttggagtcagagacatattgactcactggtgtagcttcaaatccattacaaaagcagacacaaaatatctcccatagtttgtttccttttccagaatttaccagataccagtgtatattaatgtactgaagggggcctgcccctccacacctgtgggtattcctcagaaggtggagataagagactgagaaaagaaataagacacagggacaaagtatagagggagaaaagtgggtccgggggagcagcgctcagcaagtgaggacctgcaccggcatcgacctctgagttccctcagtatttattatttatttatttatttgagacagagttttgctctgtcacgcaggtggagtgcagtggcatggtttcggctcactgaaacctccgcctcccgggttcatgccattctcctgcctcagcctcccaagtagctggaactacaggtgcccaccaccgggcccggctaattttttctatttttagtagagacggggtttcaccgtgttaaccaggatggtctcaatctcctgacctcgtgatctgcctgcctcggcctcccaaattgctgggattacaggcgtgagccaccgcgcccagcctctctcagtatttattgatcactatctctactatcttggtgaggggaatgtagcaggactatagggtgatggtgaggagagggtcagcaggaaaacacgtgagcaaaggaccctgtgtcataaataagtttaaggaaatgtgctctgcctggatgtgcatgtaggccaggtttatgtttgactttacacaaacatctcagtgcagtaaagagcagtattgctgccagcatgtctcacctccagccatagggcggttttctcctatctcagtaaatagaatgtacaatcgggttttacaccgagacattccattcccagggaggagcaggagacagatgccttcctcttatctcaactgcaaagaggcctttctctttcgctaatcctcctcagcacaggcccttgtcgggctgagggacctgtaaggtctttcccttcccataaggccatatctcaggctgtctccattgggggaaacctggacaatacccaggctttcttgggcagaggtccctgcagctttctgcagtgcatttgtgtccctggttaatcaagaatggagaatggcgatgcctttcacaaagcatattgcctgcaagaactttttaaacaaagcacatcctgcacagcccgagatccattaaatcttgattcaacacagcacatgtttctgtgagcacagggttggggctaaggttacagattaacagcatctcaaagcagaacaatttttcttagtacagatcaaaatggggtttcttatatcttccttttctacatagacacagtaacaatctgatctctcttttattcccccacaacgtatgactttcatacacagtttctctgatctggtccacaaagagctaaacgtccatccagatgtggcccttgaacaaaccctgctgcccaacatcactgacaccatggggcccacaccccatttccatccatgcctggtgtgagcccttcccaggaccatgcccagtggagcctcttcccaagctcacatcactaggttataggagatggaatttaagtgaagatgacaaggactgagaaaaggcatgggtgagtgtgagcaaacgtgtgaggcaggacgcttcagactcacaggagactgactactacaatacctggcatttcagaaaggaaagagacagaagaatccaatgagaaatatcacttcacctgaggaagagccatccctggctccttttctttgccttcttggtgtcttcctcaagtaacataagtctctggaaatcaatcctgtatgtgaaaaaaatcagagatttaatgtttagaaatcactccctccttttctgtggcaaaacacacacacgggagatctcacctgggagaaagacagccctctgctgcccactacaccagagattatgcggagataagaaggtgccacaggaagacctacaagggtaattttgacccattttcagatctttctcccctcctggaaaagtccacacacacgctgcagcaggacacagaccttcaggacacagatctggccctaaccaaaccccatgcagagcacagccccctcagctccctgtggatcacaggctgatctcagctctcaacatggaggaaactgccttgattttcaatgctggagacagataaggatcaccagtgccatagtaaatattactgagggtgggtttaaatctatgataatagcaatctctgataaaacagcataaaagatgtatttgcaaaatgcctgagaaccctaatgtgaagtcagggttgagctccactcagtgggtgccagcctagcacagccccaccttctggctctgctctccacttggggactttttcccaccaggatccagtgaacagcgaaggagcaaaaagaatcacacagaacaggcaacatggatcagaggtgggggtgaaggtggggctgtcatgtcatatgggggctgtgggtgatcacaaaagtttccatagaaaaaagtgatgtcagaacaaagacttagggaagaaacgctgcttgtcacttgcagctgaggggccagagagtcctaggtagggggacagcccaggtgaaggccctgagataggagcaacctcagtcccagaaaaaggaaagaagcctgcgtggctggagcagagggagcgaggaggacacaggcaggagatgaagtcagaggggtcctgggagcccagatctgcagggatgaggccttgaaacatttttctcccacacctcaaaggaattttggaaacgatgtattttctcactcctttcatgtatacatgcaaatgtctctttacattataaatgacaacacttacaaataatgtaatttatctcccatacttaaaatacatgctgtcaagtttggctaagcttccagaaatacactgtcaccctcatctgagacatgtaggactgtaagggaatgtgtttgggggtttaggaagtcacttatggacacgtgaaggtggagatgcctgtttgatgtcccagcagagagctgaggagacaactgcacacaggattgtagagctcagtggagaggcctgcaggggacatgggtaggtgggttaaagctgtgagatgagataaggaaaagcagtgggtgtggacagagacaagaataggttcaagatgatttgagtctaatcccgtttttccattctggtatttgtgatttttacatttttggaggactggaatccatttaacattcaaattacatctgagcagtaccctctcctaaaggaaaagccacacactatttggcaaagtatttcagggctcagtgaaattccatctctaccaaaagtacaaaaaattagccaggcgtggtggtgtgcatctgtggtctcagccatttgaggggctgactgtggtggatctttgggcctgggaggcagaggttgcagtgagtcaagatggtgccactgcactcaagcatgggtgaccgagtgacactccatctcaaaaaaagaaaaaaaaaaaattccaggacaattttatacacctgagcaaatgaaatgtctctttcaatgtctaaggtcctgatggcatgaatcctaaacatgtaattattttcccagaaaaatcatagtaatatcttcaaaataaacacaattatgaatccctagctataggtgtttaaaacactgaaagagaggcagtggtacaaatgagatctgagcaaatgttttcttcatgaacacatgggctctgctggaacaaggttccaggccaatcctgtccatccttgaacatctgcaaagaatattatggaccagaggaacttgaggggaaagcttatttagcagctcacagctcaccatttaattagatgacataaagaaagaagatggaataataggctacttcaactaaattttaatgttagcataaagaaaaagttccttgatatctttatcaagtacacatcgaaacaacctaaaatcatttatcaggtactagaaaatgtttccaatgtatgatacagactagaaagcatgcagtcctcaatgtaaactaaacacaataaatttcagagaaaaacaattttaaaatggcttaaaaatatatctaatgaaatgtggggtcaaagaagaacattttgaacacataccgtagttgcaaaacaatgatgttacctcgtaagattataccaaagctttcatgagaagcagttttttatattactttaattttattttagagatggagtctcgctcttgcccagccagagtgcagttgcaggatctcagctcactgcaacctccgcctcccgaattcaagccattcttctgcctcaccctcctgaatagctgggattacaggcactcgccaccacaccaggctaatttctatattttggtcaaaacgaggattcgccatgttagccaggctgttctcaaatacttgatctcaggtgatctgcccaccttggcctcccaaagtgctgggattacaggcatgagccagagcacctggtctatttttttttttttaaattaagaaacacgttggtcatggtggctcatggctgtaatcccagcaccttgggaggccaatacggctggatcgcttgagccctggaattcaagaccagctcgggcaacatggtgaaagcccatctctactaggaacacaaaaatttgcccggtgcggtggcacctggctatggtcctagcaactttggaggctgaggtgggaggatcccttgaacccaggagattgaagcttcagtgagggctgatcctgtcaccgctctcatgcctggccaacagaatgagacccatctttaatagaaatgaagaaaaaggaaacacatgcgtcctgggtctggggacagggagagtctaaggccaattaacacgaacctcaggaggtcctgatgacgtgtgtccatggtgttgaggctgcagtttggtttcacacattttacagacacacgagacagcaatcagtacatatatacattggtccggtctggaaaggtggaataactggaattggggaccttctgggtcacaggtagataacaaataacattctttgaatctttgatcagcctttcactaaatacacaatttatatgtgagcagggaggagggataagtcacttatgccttaggctggctcagggaccctgtatttttacataaatagggcaagggaagcaatcagatagacatttgactcaggtgtgcagagggatgggctctttcccacatctgtgaagataagctctcagtttacatcgccagggtgaaattcaacagaactattttagggtggagatcttgaggttcccggtttgggaggggcatatgtagctttttaaaaaatctttgtaactatcttgtttaggaataaaatggaaggcaggtttgtctgacgcagttcccagattgacttttctctttggcttagtaatttttattttcctttcacaagcttgtgacagccataatgctttgacacactgatactgttttatatagatttttccacaacagtaaagtccaagggtctgtcatgaaccgggttagagaagatgagaaaattttcagaagactccatctcaaaaaaacaaaacaaacaaaacagaatttaaaatacagaattaagtcatttgactttttttaaatgaaaagtctcacatatttattactgaaccaagccaacaaaggtgttcataacagatccagagaaaaaaaatacattctcaataaaacatgtccaactctccagatagtggtgacattttcagcttgatatggtaacgtgactgaatcttcagacagcatgaatatgtgtgccatctcatatgcaattccttatagatccagcttggctcttctccagtgtcgtctttgacagttgtacctataaaacttatgtggatggtctgcctgccactctgtgcatcactttcttttttttttttttttttttttttttgagatggagtctcgctctgtcacccaggctggagtgcagtagcatgatctctgctcatggcaagctccacctcctcggttcatgccattctcctgcctcagcctcctgagtagctgggactacaggcgcccacaaccacgcctggctaattttttgtatttttagtagagatggggtttcaccgtgttagccaggattttctcgatctcctgacctcgtgatgctcttgcctcggcctcccaaagtgctgggattacaggtgtgagccaccacacctgtcctgtgcatcactttcaacatcatcttgtcccaacttaaaataagttttccatttacaaactggtgatttattttgggaatcgtccccataaccttttcataaagcatcaatgatttcattgtccctctacccaaactttaccagattcatttttcgatacactatctgtctctgtcacccatgctggagtacaatggcatgatcatggctccctgcagcctcgaactcctaggctcaagccatcctcccactgcagactccacagaagctgaaccagcagacatgtgccacaatgcccagctaatttatgtattttttgtagagaaggtggtttcaccattctgcccaggctggtcttgagtaccggggcccacgtgacccaactgtctcagcctctgaaaattatgggattacaggcctgagccacagcatctggtctcatcgcaaatttgatgtttcttcttgtttcagttttagcagaatttacattgccttgattgagtctcttttcaaactcatgtcttacccatctgagtgcctcaaaccaaaccctgttcagacatgttataacggatttgtatcagtttatcttggtgcaaaaaatgtgatatcatgcacaattttctcataatatgtatttttccatgaacttcctgaagaccccttgtactagcgaactgtattcaagaggttataaaaaggattgttgatatgcaagtgccacttatttctgggatgcaaaatggttcaacatagtcaagcaaatcaatgtgatataccacttgaacataatgaaagatgaaaaccacatcatctcaatacatggagaaaaagcatttcacaaaattcaacatccagtcatcatggaaatcctaaacaaaatagaaagagaaggaaatttacctcaacaatacaaagaccatccatgaaatgaccacagcagaaataaccagtcagggaaaatggaatgcttttcctgtaggatctcacatgatgcaagaatgctctcaccccttctattcaatcaatactggctgtcctagctagagcaatgaaatagcaaaagaaatcaaactcatccaaatcagaaagaaagaagtaaaactatttctttgtagatgacatgatcttctgtgtagaaaatcacaaagagtcaaccaaaatgcaactggaactaaaaaacatatgcagtggatttgaagaatagaataacagcaccaaaaattagttgaatttccatacattaacaataaacaatttaaaaagaaaattaaaaaaacactttcatttgctaaagaacttaaagtaagaaatacttaggaataaatgaaaaaagttgagaagtttctaccttcaaatctacaaacattgatcaaagtgataaaaacatgtgcaaataagagatacaagccatattgaatggaataatattgctaaatgattataactgaatgtgatgtagattcaacacaatacccagagaaatttctataactttttgttaaagaaacaaaaaacaggccaggtgtggtggctcacgcctgtaatctcagcactttggcaggtggaggcaggtggattttaaggacagaagatcgagaccatcctagctaacacggtgaaacccagtctctactaaaaatacaaaaaattacccgggcatggtggcacgcacctgtagtcccagctactcaggagactgaggcaggagaattgcatgaacctgggaggtgaatgttgcagtgaaccgagatcacatcactgcactccaacgtgggcgacagagcaagattccatcttaaaaataaataaataaataaaagaacatacaggctgggaaaagtggctcccgtctgttggccaggctggtctcaaattcatgacctcaagtgacctacctgtcttggcctctcaaagtgctgggattacaggtgtgagacaccacgcctggcccaatcctcttaacataaacagtttaatgtcgattaatgcttgaaatcaatgttaagtcaactcaaactcaggtcaatgctgatttgactctgatgtcaattaatgcttgatggtttgctatactcattgcacttgaaacaattgtctccaaaaggaattttctgatgttctgcaaggagtgacctcagactaaagaccttgccacactgatgacatttgtaagatttctgtccagtatggattctctgatgcctaataaggtgtgaaggtgaattaaaggctttaccacaatcaccacacttgtgaggtttctctcctgtatgaatcctcctatgtctttcaaggtgtgatttgcgaatgtaaactttgtcacattcttcacattcgtaaagtttctctccagtatgaagtttttgatgacatgcgaggtacgcttttgtactaaaaaccttgccacattcattacatgtgtaaggtctctctccagtatgaactctctgatgttctgcaagacgtgaatcactccggaaagccttgtcacaaaccttacatttgtatggtttctctccagtatgaatcctcctatgtctttcaagatgtgatttgcgactgaaaactttgtcgcattcttcacatctgtaaggtttctctccagtgtgaactctacgatgtcctgcaagagttgctcgttgcttaaaaaccttgccacattcattacacttatagggtttctctgcagtatgaactgccttatgaattacgaggactgaatttcgagcgaaggtcttgccacactcattacatttgtaaggtttctctccagtatgcagtctatgatggtacacaaggtgtgatgtctgactaaaggtcttgccacactcattacacttataaggtttctctccagtatgacttctatgatgacatgcaagggttgctttttgatcaaaaaccttgccacattcattacatgtgtaatgtttgtctcccctgtgaattctagtatgttttgccaggtgtgaatcatgcttaaaagccttgtcgcaaaccttacatttgtatggtttctctccagtatgaattatcctatgtatttcaagatgtgatttgcaactgaaaactttctcacattcttcacatttgtaaggtttctctccagtatgaattctcctatgtcttcgcaaatgcaaatgaaatcttgattcaagctgacctttaataggcttgtttccagcatgcctttgatcatatcggtctgtactactagtcaacttttttatttctgtcatgggtgcttcatggtcatttgtttcatcttcttgccactgaaacacaaagtcatgaatgtctttctcaatttcctgggagcaaaatgctccaatgtgataacttgcttgtctctgcaatgtccctgtgtggatcacttctgtattgccttgccctgttgatgacaatgtattcatcatgcatttggaagagatatctacaaaatataaacaccaataggtttccaattaagtacagatggtataaaacactgaaatgtataaatatcacacacacacaaaaatacttattttaaacttcccaaacatgagcttcaaagtttaggaacacaaaacaagtaagattctttaataaataaaggccaattacatgtacttcaaatcatttttacagaagcctatttccaatatcatgacaaaacactgacagggcacaaacacacataagcctaaagtaaggagtatttttccactttaatcctaaggggtatcacacagtgcaaaaaatatatcactgtcacatcaaagaagagaaaaatatgtattcttcatatatacagtatatttagtatacagaaataaatgttaaaaaaccagacaatgtactatattggtaaataatccacaacaagctcttgtaaggataatcaaaatcaatggaaattctgtattatcaaacaatcatagcactgagaagataagattacaaaaattagccaggtgtggtagcccaccctgtcgtcccagctactcaggaggcttaggcacaagaattgatttaagccaagatgcaaagtttgcagtgagcccacatcgcaccactgcactccagcctgggtgacaaagtgagactctgtctcagaaaacaaaaaaaggcagggggtggtggctcgcgcctgtgatcccagtactttggaaggcggaggcaggcacatcgcctcaggttaggagtttgaccaacctggccaacatggcgaagccctgtctctgctaaaaatagaaaatgtagccgggcatggtcatgggcagctgtaatcccagctagctgaaaggatgaggcaggaaaatcacttgaactcgggaggcaaagattgtggtgagctgagatcacaccattgcactccaccttgggtgacagagtgagactccgtctcaaaaaaaaaagaaaatgttaatagcatatttttctgaataactgttacaaaattacctatatccatgtggaacaggcatgttgtaacttaaaaaaaaaattttgtatttttatttttttgagatggagtctcactctgtcacccaggctggagtgcaatggcataatcttggttcactgcaacctccgcctcctgggttcaagcgagtctcttgcctcagcttcccgagcacctgggattacaggcgcacaccactatgcccagctaatttttatacttttaatagagatgggctttcaccatgttggccaggctagtctcgaactcctgtgaactcctgtgatctcgaactctggtgatccacacttctcggcctcccaaagtcctgggattacaggcatgagccactgtgcccagcggcagtttgtgacattaacgaagggagtgtgtcagttatattgaataccacataccaaaaactcataaaaggaagaaaataataagtcaatttatactgcctgcagaattctaaacaattccctcttaagaaaaaggccataacttgtagttaccacccgtacacaacataagaactgaaatacatgttaaaatcactaccttctgaagtatgaggtgaagaaaatacacagaattataaggaataagaattgactaatggccggccacggtggcacatacctgtaatcccagcattttggtaggctgagtcgggtggatcatgaggtcaggagtttgagaccagcctggaacaaatggtaaaaccccatctctattaaaaatacaaaaaaaattagctggacgtggtggcaggtgcatgtaatcccagctacttgggaatctgaggcaggaatcatttgaacccaggaggcggaggttgcagtgagccaagatagtgccactgcactctagcctgggcaacaagatgagattccatctcaaaaaaaataaaataagataaataactacttctcatataagctttggtagatgtggtattctctaataggatgttcctgcagatgcagactttgagagaatttagtcatgggtgttgactcctcatgaataggactagtgcatttatagagacattaaagagctcattgcctgttcctctttctaccatattgggacatggcaggaagatggctgggctaaaccgtgaagaagcctctcaccaggaatcaatttggctggcaccttgctcttggatttcccactttccaaattcatgagaaataaatttctgtgtcttaagcttcccagtttaagctacttcctttttcgtttattcttcagatcgagtcacgctcttatcacccaggctagagtgtactggcaggattctcctacctcaactgattctccctcctcagcccagagtctcactctgttgcccgggctggagtgcagtggcgtgatctcagctccctgcaacctccacctcatgggttcaagtgattctcctgcctcagcctcccaagtagctgggattataggcgcaagtcaccatgcacagctggtttttgtggttttagtagagatggggttttaccatattggccaggcttgtcttgaactcctgacctcaagtgatcaacctgtctcagcctcccaaagtgctgggattttaggtgtgagccactgcgcctggcccatttttggcatttagtacattccaggtttcaccatgttggccagactgttttcaaactcctgacctcaagcaatctacccaccttggtctttgaaagtgctaggattagaggcatgagccaccgtggccagtcagtctaagctatttctaacagtgaaatgacagagaaaggaacaggagcatctcatcatcaacatcaccacaggctgacaaatcttattaaacaaaggatgtttagggtctctactataaatcttgcaatacttgaagccatctaatagcactaacatgttttaaaaaccttgagacatgtagggcatggtaatcccagcattttgggaggatgaggtgggagattcctgaggtcaggagatcaagaccatcccagctaacaaggtaaaaccccatctctgctaaaaaaaaatacaaaaaaattagcctggcatgttggcactcgcctgtagtcccagctacttgagaggctgaggcaggagaatcactggaatttgggaagtggaggttgcagtgacccaagatcacaccactgcactttagcctgggtgagagactgagactgtgtctcaaagaaaaaataaataaatgacagaaggctaaagaataactccaacccacaaacatatataaagttctccagtaaaggtaaataaaaaaaacgggtaggctgggcatggtggttcatgcctataatcccagcactttgggagggcaagccaggcggatcacctggggtcaagggttcgagaccagcctggacaacaaggagtaaaccctgtctctaccaaaaatacaaaattaggccaggcgtggtggctcatgcctgtaatcccagcactttgggaggctgaggtgggtggatcacaaggtcaggagatcgagaccatcctggctaacacagtgaaaccccgtctgaactaaaaataccaaaaattagccaggcatagtggccagcacctgtagtcccagctactcaggaggctgaggcaggagaactgcttgaacctgggaggtggaggttgcagtgagctgagattgcaccattgcactccagcctgggaaacaggagtgaaactctgtctcaaaaaaataaataaataaataaaacaataaaaatacaaaattagctgggtgtggtggcgcatgcctgtaatcccagctactcgacaggctgaggcaggagaattggttgaaccggggaggtggaggttgtggtgtcaagattgcagcactgcacttcagcctgggtgacaagagcaaaactctgtctcataaatacataaattaattaattaataaaaggacagatacagaaactcgcatacgtataccttttcttcataactaaactttttttcatattattaaaaatgaaaatgtatgaaaaaacactgtacatatatgttaacagaaatgcaacatacacaaaaataactctgacaaaaataaaaaagttctactggagaagaagtagtttttgtaggttatggaatttttttatttttatttttatttttttgacatggagtctcactctgtctcccaggctggagtgcaatggtgcgatcttggctcactgcaacctccacctcccaggttcaagtgactctcctgcctgagcctcctgagtagctgggattacagctgcccaccactgtgcctggctaatttttgtaaatttagtacagatgaagtttcatcatgctacccaggctggttctgaactcctgacctcaggcgatctgcccacctcggcatcccagtgctggaataacaggtgtcagccactgcacctggccaggttatggaaattttaagcttcattattgtgctataagtttaagatgtttaacatacctgcaacaataacctctccccatatatcaatacaacgcacttcacttctgcgtactgaacggaatggacactaatgtggttgttatattcacactggaatcatgtttaaaccacttatgtttactaagaactaaaagacaaaactatttaaaagaataaccatggttgggcatggcagctcgcgcctgtaatcccagcattttgggaagccgaagcaggtgaatcacttgagataaggagtttgagaccagcctgaacaacatggtgaaaccccatctctactaaaaacacaaagtgagctgggcatggtggtgagcgcctgcagtcccagcctccaagaaaggtggggcacaagaatcctttgagcctgaaaggcagaggctgcagttagccaagatcgttccactgcactgtagcctggatgaaagagtgaaactatcaaaagaaaaagaaagaaaagaagaaagaaagaaagaaaagaaagaaagaaggaaggaaggaaggaaggaaggaaggaaaagaaaaaacaaaacaaaagaaaagaaaagaagtaaataaggaaagagcagagggataagtgagggcaaagaaagatgtcccttcagagatctcaggattgaaacttttcttttgccacagaattctcccacttgcagagagtttccccacacactatttgaaggtggagcttccactctgcccatctgagctcttacctgcgtttacacctgtaatacattcccacccatctggagttttttgttattttcacttaactctccacagtccagggctctttcccttgctccaacatggagataacaggtcagaaagagactcgtgcttataaaaagaaaggaccatgatgtgctggagcttttctagagtcccagccctatatttctgtaggaaagaagacattacaggtggatctaggaaaatatttcacaaattcctccactgactgcctcattctgaatgctgttggagcactgtaatatgtaatatgtggacatcgggctatcttccaagaactaatgagttgaaagcacaggagaagcaaacagggaactggatatgtttaaagtctaccataaggttttgtttttgttttttgagacagtcttgctctgtcgtctgggctggagtgcagcggtgtgttctcggctcactgcaaccttggcctcctgggttcaagcaattctctctcctcagcctttctaggagctgggattgcaggtgtgcaccatgacgtccggctaatttttgtatttttagtagagacagggtttcaccatgttggccaggctggtctcaaactcctgacctgaagtgatccacacacctcagtctcccaaggttctgggatgacaggcatgaaccaccatgcccagcttgccataaggttttatgcctactttagttctggaacccacattgaggtatcatgaagaacgcagaacatctaaacaaaggggacagtgaaagtccagatgctacatcatgaagcttttcatttcaaaatcaatacagcttccattttagtcaagcaaggatgcaactcccaagagaaacaagagaaaatacaaagatccacaagggcacatccccacttctggagggaagttatcctcacccagggagaccaggttcctataattctccagcatcacgtctctgtatagagtcctctgagcagggtccaggcatttccactcctcctgagagaattctatggccacatccctgaatgtcagtagaccctgaaaggaaaacacattttaagcaaatggttatgggaggagatcttatctttacagaaaatgagaagaggagaggggaaagcatggatttaattgcagagaatgttccgacaaatccaagtaagggattcttcaccacatgatgtcttcccagtggtgtttgattatactttctgaagagctcaggataccctctcagtatgaattgcttacgttagaaataaataattagccgggtatggtggcaggcatctgttgtcccaactacttggaaggctgaggtgggaggacggcttgaccttgatggtggaggtttcagtgagctgcgattgcaccaaggcattctagcctgggcaacaaagcaagactctctctcaaaataaaataaaatacatgaaagtaaaattacacaaagcacaaaaatccattttgtaaatgttcacaaaataataaaacctacacagactgaaaaaaaactagatgttaatacaaagggttgtcatttgtcccagattttcaaaatataaaagattttcaaaatatatacgtgtgtgtacatatgtatgtatgtataaatgtgtgtgtatgtgtgtggggatgtgtatgcatatacatatataggttttacaaatataaaaagtagcaagttttgcagggcgcagtggctcacgtctgtaatcccaacactttgggaggctgaggcgggtggatcatgaggtcagcagtttgagactagcctggccaacatggtgaaaccacatcttaactaaaaatacaaaaattagctgggcgtggtggcacgcacatggagtcccagctactggggaagctgaggcaggagaattacttgaacctgggcggcggagtttgcagtgagccgagaaatcgccattgcactccagcctggtgacagagtgacactccgtctcaaaaaaaaaagaaaaaaaaagtagcaagttttgtttaactgaagaggaatctcatcttgctggaaaaggatactttggcagctgctggtgggtggaatctcatcagatctagggaaacaggaaatgccccatcctagatgaatcaattacccttttaactgcctggcctggaggacagagaatggcttgaattcgggaggcagagggtgcagtaagccaagatcatgccactgtactccagcgtgggtgacagagcaagactccatttcagaaaaaataataataatagttataggtggaataagaatatggctttatcctctaggataaaaaagaagtaccgctgccatatttgagaaaaattgtaaccagttttaccacaaacacctgtttcacaagcctctccacaggaaccccacagtctccatgagcgtaatgtgctaagaatggtctaacgaatctcctgctattatttaggttgatttcctattcttaaaataatgataggatcattcttgtatcattcatatctatgtatgaagtttccattctaattagtaagattttttgagtcagaaacacagtaagtcactcaattacctaaaaatgtactataatgtcaggcagaaaagatttcctattattggtctctctttctagaatttaccatgcactttgtgcacattaatatgtgacttccattggcagctgctctaatcctggtccacggagagctgacagagcatccagatgtggcccctgaacaatccctgctacccaacagcactgacaccatgggaccctcaccccgtctccatccatgtctgggtgtgagtccttcccaggaccatgcccagtgcagcctcttcccaacttcatgtcacttggtcacaggagataaaatctaagtgagataagagggactgagggaaggcatgggtgattgtgagcaaacctgtcaggcaggatgcttcagactaagagaagattcccaactccaggcgccagcatttctgaaaggaaggagacagaacaatccaccgagaatatcatctcacctgagaaagagccatccccgactcctttgctttcctcttcctcttctgggtttcttcctcaggtaccaagagtctttagaagtcaatcctaaatgttagaaatatgttgtttatcactgagaatcaacacaccccctccccataacacaatgacacatacaaaggaggcctcaccctgggaaatatggtcccctctgctgcccactgccccagggatgataaactcctacaggaaaactcccactaccctactggaggagtccacacacacgctgcagcagtggggagctgggctgggatgagctccccttcagggcacagactcagacctaaccaaaccccacacagaggctgggtgtggtggctcatgcctgtcaccccagcactctaggaggccgaggtgggtagatcgcttgagctcaggagtttgtgactagcctaggcaacatggtgaaaccccatctctacaaaaatacaaaaagttaggaaggtatggtggtgcacttctgtgtgtctgtggtcccagctacttagggagctgagatgagaggatcacttgtgctcaagagttcgagaccagcctggccaacatggtgaaaccctgtccctactaaaaatacaaaaattgggccgggcgcggtggctcatgcctgtaatactagcactctggaaggccgaggtgggtggattacttgaggtcaggagttctagaccagcctggccaacatggtgaaaccctgtctcttactaaaaatacaaaaagtagctgggcttggtgggcatctgtaatcccagctactcgggaagctgaggttggaggatcacttgaacctgggaagtggaggttgcaatgggccgagatcgtgcaactacactccagcctgggtgacagagtaagacttaaaaataaaacaaaacaaaataaaataaaataaaacaaaactacaaatacaaaaattagccaggtatggtggcgggtggcacgcacctgtatctcagctacttggtaggctgaggcacaagaatcacttgaacccaggagacagaggttgcagtgagccaagatcaggagactgcactcacagcctgaaggacagagtgagactctgtttgaggaagagaaaaaaaaaagcgtttctgatgtgatagagataataaaacctgagtaacatgatagagattgatgggcagagggaatttcagatgggggtgggagggcatgggagacagctctgagcctagacctgaaggagcagaaagggagatggctgtgatcatttagggacatagggtaagaacggggaaaatgacctgagacaggaagggttttgatgtttggggaaagagataagcaaatgtgactggggcggagggagtcattagattagggcaagctcccaggaggaggctggacactggcaggggccctggacacagggctgtggagccacactgatgagttgggcttttgtcctggggaacacgggaagctggtggagggttccctgccagggactgatgtgacctgctttacatttagctgtgatatcctcagagtggggacatattcaccgagttaccctgagaaggtctgagatgagtgagaaggtgtgtctgaattcttacatgggggcccagaagggctaatggaaagggttggtcttatcacctctctttgaaaattagagaagcatctttcacatacctgggctaaagaaacttcttttgcaacgttctgatgctattgactttcaacatttaattcttcttacaagaaaattatagtaacatatataaaatgcagaagtgaaaacacacagctactgaccttgaaaacagggaggccaggcagggtggctgaggcctgtaatcacagcactttgggaggccaaggcaggcagatcacctgaggtcaggagttcgagaccagcctgagcaatatggagaaacccccgtctctactaaaaatacaaaaattatctaggcatggtggctcatggttgtaatcccagctactcaggaaggttgaggcaggagaatcacttgaacccggaggcggaggttgcggtgagctgagattgcaccattgcactccagcctgggcaacaagagtgaaactgtgtctcaaaaaaacaaacaaacgaacaaacaaaaaaagaaaatagggaaagagggtcagctgtagaactactatataagcaaatgttttcaatcaagaaaacatgggtggccagatacagtggctcatgcctgtaatcccagcactttgggaggtcaaggcaggtggatcacctgaggtcaggagttcgagaccaacctggcaaacacagtgaaaccctgtctctactaaaaatacaaaaattagccaggctccatctccacaactcatttaatctcttgctgctccttctccccaatctttagatcatcctcaatctctatagatttccacctcttctcccatctctgtgcatcctctgctctccctgttaaattgtctcttccttgttatacctccctggccccactctctggcaccccagatccccaggtgtcctccctgctgtgcttctccctctgttctccttgccaccagcaccactctgctctgtctgccctggctccaaatccctcctcctctccctcactctgatgagactccctctttgctgtccctctccctaccttgctgtccttcatctctctgtacatctagcttttctctacatttctccagttgcttttctcctcctgctttcttattttttttttcacttttgctgtctcttggcaaatccctcacccatcttctactttgccatctgttatgggcctttctcattcttcttttctctgtctcaggttttttactgctctctctctgtctcctgatccctttggcccacacaatcacaggagggtttggacaccttcatgtcagaggagcccattttccaggggctggcactgggcagggaagaacaccttgtgtcaccatataggccccaggcacctccccaatgcgggcctgggcaacagagcaagactttctcaaaataataataataacaataataattatgtatatatattgcaaatgctgtgttttctacgtaaaccatgggcttggccacacgcattacctcatgcctgtaatcccagcactttgggagggtgaggcggtggatcatgagatcaagaggttgagacaattttggccagcgtggtgaaacccgctctctactacaagtacaaaattagctgggcttctcggcacgcccctgttgtcccagctacttgggagactgaggcaaaagaatcacttgaactcgggagtcagaagttgcagtgagctgagatggcaccagtgcactccagcctgtcgacaaagtgagactctgtctcaaaaaaaaatcatgggcttatccattaatgcacttctgcacatacttcaaattacatccacacacacttaaattaacttgcgttcagaaggtataagcaaaaacctggagaggacacaaccaaagctactcaccaggctgaggtgggagaattgcttgagcccggagagcagaggttgaagtgaatcaagatcgcacaactgccctccagcctgggggacacagcgaaactccatcacctccaccccccaaaaagttggaagctcactgaattaagatacaacttcaagaaatcataaaagcaatgcatgaagaacatgagaaggacaaccaacatacagaaattatgacgaactacacagaaactctcgggataaaaatacagtaactaaatggaaaaactcaatacatgggttcaaaatcagaattcattatgtaaattaaaaactagtgaagaggggtcaggcaaggtggctcacacctgtaatcccaggactctgggaggccgaggtgggtggatcacttgaggtcgagttcagagaacagtctggccaatatggtgaaaccttgtctctactaaaaatacaaagattagctgggtgtggtggctggctcctgtagtcccaggtactctggaggctgagtcaagagaagcacttgaacatggaaggcagaggttgcagtgagccggattgccccactgtactccagcctgggtgacagagcaagactgtctcaaaaaaaaaaaaaaaaccaaaaaacaaagaaagaaaattccaggactatcttttatacacctgagcaaaaggaatgtctctctccatgtctaaggttctgatggcatgaatcctaaacatgtaattattttcccagaaatatgacagtaatacgttcaaaataaacacaagtgtgaacacatagctataggtgtttaaaacactgaaagaggccaggcgcggtggctcacgcctgtaatcctagcactttgggaggccgaggcaggtggatcacgagctcaggagattgagaccatcctggtccacatggtaaaacccggtttctactaaaaatacaaaaattagcctggcatggtggtgtgtgcctgtaatcccagctactcgggaggctgagacaggaaaatcattggaacccgggaggcagaggttgcagtgagccaagatcacaccactgcactccagcctgggtgacagagtgagactccttctcaaacaaaacaaaacaaaacaaaaaccaaaacaacaacaacaacaaaaaacactgaaagagaggcaatggtagtcataagctgtaagcaaatgttttcttcatgaacacatgggctctgctggaacaaggttccaaaacaatccagcccatcgttcaacatctgcaaggaatattatgaaccagaggaacttgagggagacatttacttagaagctcacagctcaccattttatcagatgacataaggaaagaaaatagaataggctacttgaaccaaattttgatgttagcgtaaagaagaaaggtcctggggccgggcgtggtggctcacaccttaaatcccagcactttgggaggccgaggtgggtggatcacctgaggttgggagtttgagaccagcctgacaaacatggagaaaccccatctccactagaaatacaaaattagcttggcgcagtggcacatgcctgtaatcccggctactggggaggctgaggcaggagatcacttgaacccaggaggcggaggttgtggtgagccaagatcgcgccattgcactccagcctgggcaataagagcaaaactccatctcaaaacaaacaaacaaaataggtccttgatatctttataaagtacacattgaaacaacctaaaattggccaggcacggtggctcacacctgtaatcccagcactttctgaggctgaggtgggcggatcacctgaggtcaggagttcaagaccagcctggccaacatggtgaaaccccgtctccattagaaatacaaaaattagccaggcgtggtggcaggcgcctgtaatcccagctacttgggggctgaggcaggagaagagcttgaacccaaaagacggaggttgcagtgagccgagatcgtgccatcacactccagcctgggggtagaagggagactttgtctcaaaaaaaagtaagaaagaaaaaaagaaacaacctaaaatcatttatcaggtactagtaaatgcttccaatatatgatacagactagaaagcatgcagtcttctatgtaaactgaacacaacaaatttcatagagaaacttttaaaatggttaaaaatatatacatctaaaaatgtatatatctaataaaatgtagggtcaaagaagaaaattttgaactcatatcatagttggaaaacaatgatgtgagctcataagattctaccaaagcttatttgaaaagtagttatcttacttttttcagacggagtctcgctctgtcaccccaggctggagtgcagtggcatgatctcagctcactgcaacctccccctccctgtccaagggattctgctgcctcagcctcctgagtagctgggattacaggcgcccgacatcacacctggctaatttctgtattttattcgacacgagatttcgccatgttgactaggctggtctcgaactcctgacctcaggtgatctgcccgccttggcctcccaaagtgctgggattacaggcatgagccattgcacacggcctttatttttatttatttattttttaattaagaaacaaggcgggcatggtggctcatgcctgtaattccagcattttgggagggcgatacagctggatcgcttgagccctggagttggagaccagcctgagcaacaaggcaaaagcccgtctctaccaagtacacaaaaattagcgcggtgtggtggcgcgcggctgtggtcccagctactctgcaggctgaggtgacaggatcgcttgagcataggatgttgatgatgcagtgagctgtgatcctgtcaccgctctcccgcctgggcaacagagtgagaccccatctccaataaaaaagaataaaaaagaaatacctgggtcctgggtctgggggcagcgaatctaaggccaattaaggcaaactttctaaaactagacaaaaaggaaaaaccccatctccccatccggagtaacaaaggatcaaaggccgctgtccctaccgccctcctccttccaccacgtctcagaaagggaaagagcccaggagtggccatggccaagcaccggccacaccttcatctgcatagggcacccatctgctccggcctcgggccaattcacctcagcatttcgttggccaagggccaaaaatccttcatccagataaggggtagcccatagggacctcaaaataaatactttaaccccctaaaactttctaaacgggtccccggagacgctggctcgggcccactcccctctgtggagtgctttcttgattgcatatattcgttttccaggagttggaactaggtagcaacaccgcacaaggagggaggtggggagcgacggagccttcggacaggggtggcgtctgcaggatcttaggaccaggcagaggacgcggcctcccgggaaccggggttgaggcgcggcgctcctgaagccgccgagagcgacggtgggaggcgcctagggctggaatccagctcgcgggtgaggacttgaaacagcgcgaggcgggaggacaggtcaggaagggttttgagaaggaaaattccgcgataggaggtgtctgcacgaccccactgcagaaagaccgaggacgggacctgcctcagggccactttaaactcgaagggactcacggactctcacccggacgtctcaatttgctctgggttgagaaagaggggccgcaatttccaggtctgtggggactcaacgtccccggtatagcagcaccacaggactgggaagcacacataaaacagagcgaaactcacgcgctgtggtgtgaccttcagtccctgccatccgcttccgggtctatgccaatcagcgcaggacagaggccaggcctgggcgggacccccgagaaggtaggcggggcctggactaggccgggatgagacgcgaagaggtgggcggggcctgaacaaggccggggcggggttgagaaacaaggggcctggctgggagaagagtcctgggctatgaggggtcggcgggggcgagaagcgggtgggtcctgagctttcctccatctcgctctctgcgccttttttccaggttttggaggcgaaagccgccagtgaggctggagcagctcagcagtcattgaaatagtacctccctgagaagtcaacgtgaggcggtcattggacccaggaaagttccttgctattgaaattaattttagcaatttatgtccaaaatctggaagttgtcaagggaaggaatgcaaactagaatgcgaaatacaaagctctgcctcagcgaaacctccaatttcctgctgacggcccacagaacagaatagcaaatcctctccctttctattttccattcactggggtgggagaatccaccctgtgctcagctccagagacttcctcagggccaccgcctggggtgcggagcggaggcctcaggccagggaggagtgaggtcaccacctcctgcttaaacacagcagggatgtgggcgaggtggcgagtctggggtcccggctactcaggaagcaggagccgcaagaccgctgagcccggaggtccaggccagcgtgggcgacaaagtaagaccctctaccccagagctccttcctccgcctcaataagaaaaaaagggatttttaaaaaaagcattgacattgtaacagtgtgtagcagggctagcggcagacaaaacttctcagacactgagttgtagaaggaagggctttattcagctgggagcgtcagcaatctactgccttgaaatccgagctccctgaatgcacaatttctgtcctttttaagggttcacaacactaaagatttcacatgaaagggtcgtgattgatttgagcgagcaggcggtacgtgacaggggatgcatgcaccggtggtcagagagaaacagaacagagcggggagttttacaatgttcttctatacaatgtctggaatctatgaataacattgggttctaagccataagttgatttttaactactgggtttaggccaggcaggcccaggcctggtttcgggcctggccccggggctgcctgtctttggttttactttcttgttgttttttcttaaaacaggtactgagtataaaacaatatgagagggtctctgtcttcctttatttcttctttttgagagtctcactttttattagtgggagttcttactcttgtttttgctacttatgtctttttgtgtaatagattgatagtgattcatatagtacacttgtgctgaatcattttggtgaactaaggtagcgatgaagctttttatcatttgaagaggtacaggtagcaaacaagagagcagtaagcagctttttattactattataactcttattataagagttttaaatcctcctattgctgggaactaatttttaaacatggctcctggattgagtccgtgccacacctgtacgggtacatgtgtcagttttgttatatttttaactatgtcttcaactactttcctctgatgatctatgtgtagacaacaattagtaaggttaaattttctacaaacttttccttcagctgctagcaagtagtcgagagctagtctattttgatagatagcatttctttttctttttttggtgatggagtctcgctctgtcacccaggctggagtgcagtggtgcagtctcagctcactgcaagctccacctcccgggttcacgccattctcctgcctcagcctccctagtagctgggactacaggtgctgccaccgcacccggctaattttttgtatttttagtagagacggggtttcactgtgttagccaggatggtcttgatctcctgactttgtgatctgcccgcctcagtctcccaaagtgctgggattacaggcgtgagccaccgcgcccggtgatagatagcatttcttatcagagtctcttgccgggcaagaacagtcaaggcttgaccggttttattagtaataatttttaaaacagcttgcaactgtatgattcggttgagcatgtagatgggggttcgataacctcatgagctgtcttgtgtctaagtggcaggcttacagtattatataattctttaggaggtcatttatcatctttctaattacctatggctatgcttcgtttttcacaggaagcatagactgggaagcctagaagttcacctgtatttatgggcagtaagaggaaagatggcttactggtgccaattacacagctacctgtccactgatcaggcagcttagcatgagctctgtctatgtatctggtataacctggtgggggccgtctagtcctggtggaattccgggtgggcctcaacagtctgcaactttggaaatttactgaatggatttctttttgtgtaactggaactttagtatgtaactgtttttgtggtactattatacaacttttgcctaagacaactaagccgccttacaggatgatgagtgaatttttttctttctctagctatgcaataccgtctaataattgagacttttagaacttaaaaattgtcagggtggttcttttgggctgggaattcatcaggaactgggtttgtaggaactaattctcgggcttcctatggccattgatctcttgttacagttcttctacaaacataacatgaggtgacttgtagagactgggcctcatgttaggctaattgcaaaaacaaatttttagtttttcctggaatcttaggtactggcacatttatttcatcatagaaagcctgaaatactggttctggagagcatttttcaacttctttttttattaggatgtttacgctaggatctagttttttttcatcaatgcttaatttacattttttttttaattgtactttgggtctgatgggtttgtgattatcaattttaaaaggctgcagcccccactcatgcaagaggggctgacttttcttttttggagctaaacaggattatttttatcttctttttaagtagcccaaatgacataagactagtattgacacatctcacataaatatgattcttgacagatatacttatttttttttttaactgtgtaactttttttctaatttagagaactgcatcttattctatgctgcttactatcaatagtggcacaagcatcaaattttaaggttatatttttggggacccctcttctgttctagctattattttacttgtgtcacttagaaaaagactagtctttaattttattttaaaaactgtaatcatgggaggcttaaaatgggttataacacacatcaggttggttattccttgggctacatactttggatagaatagcattatacaaacaaatttcttttagaatcctggtacacttataataactataaaataataggactgtagcaatcttttgtctaacttcagtgacttgatgtagatactggaaacagttctttgtctgaggaaggtcagttgaagtccttactgtacaagtctaaattttaaggaaaatgagtcctgcgatgagtttcttcctgcttcagtcgtgcgtggaccagtcagcttccgggtgtgactgcagcagggcttgtcatcttcttcagagtcactttgcaggggttggcgaagctgctcttatctacgtacagctcctagtctactgatgtttaagggtggtctcagaggttgggcccactagaataaactgagtccagcacctctaaacagttatgtttaactgggctctttgatactaggagtaaggtggcggggttagggtgttgcaaacttcaatggttatgtggggattttcacagagcaagctttggtatctagttagtctagcgtttattagctaatgatgtcttttgttatttattaaagggactttatgtttatgttttgcctaagagttagcttatctgcttcttgtgctaacagggccattgctgccagggcccttggacatgggggccagccttgggaaacctcgtctagttgttttgagagtcaggctactggccttggccagggccttacagtctgggttaaaacttcaactgccatttttttttttctttctgacacatagagtgcaaagagttttgtcaggtcaggtagcctcagggctggggctgacatgagtttttcttttttttttttctggttgatgaaataccagggtgaaatggactaaaccataagtgccactctagttattcggcagagtgcctactaaaggtctactacaataccaccacacatctgctcagagatgaacaagggctgaccgattgataagctcttgaaaattcttaagctcactgcatcctttcaggtctccaaggaatgctaaatctcctctctgccgtgagatacaagaagtgaacttagtattgggagacggaagctggaaggccctcgggggctgatccgcagggacttcgggatatagcagagagagctatatgttactccaggctgtagaatcctggaaaagagctaccatgcagcccacacctggtcaactacaggaccaccttagtggaagggggacaatcagggcctctggcctgccatgtgcacaagcataacaattgcttttgtttaatgtgcagatggaatatttgatctatttcaaccaggcatttgcatcttggtatgctgtctcaattgccaaagtttgttttaagtctttaacttctatcatcctctagtaaaatgaatgcttcctttagcaccgatttttattagtttttagaccaaagaaagctgaacaccattttatatttaataatgcttcttgtatgatttttataccagataagctaaattttacttttatattagtgtgttactaatgttaaatttaattttaatgaaactttgtagacatatttatctaatttttcatgtttgaccataaggttagattttgtagactctttttaactttttgtaatttttgttaaagagcaggttgatgctttaagaaaaaacctgttgcatttttactttgatgtccgtttcacagaaaaactggatgatacctttttaactttagctaatatgtttacacacagaattttctttacaattaatgttttaaaacttgcttaaactttcaaacaataatttttttaactttttaatataggtaaaaatccacattcttatgcctccttataatctttttactataggtatattttacttttcttatacaccttgtacataaactgtttcttcaataataggaggccttattacttttaaattatacattttttgcataaaaaaattttttaaagcaaactttatgtctttggactagactgtctaaggctaccagattagaagttactataatacatgctacgctgttaacttttagcaaacttcacttttgttgaaaaccttgtaagtttgggacttcaattatcctttgctattaataagaccttgtttagtctaaattaacttagaattggtatagatggcctctttttctctctgctggtcttttcttgcctctgccagccacttatgctgctgttcttttaactactgtggggggcggggggaggaggtctaaaaccaggtgtaactgtctgtgtactgaaactggtctgggtgccttggcttacaggttaccttgtgccatatctttgaaactagggacccatccaggcttccttctgatggctaacctacctcaaatgctggccagtctatttcacacaaagttctaagttttcctggggtcacagttacaccataatctcctttaaattctttcttgaaattctttaacatatttcttagtggggtgggcttactttgtgcctgaactatgttttttttttcttctgagacaaaatgccatgctcacaccacacatactcaccacaagaatgggtaaagagggcacacacacgcacttttaccgtttataccaaaccaaaatcatgaaattcaaaatctgagtactaaaaaattcaagccaagtcaaaaccaaaactaaagtatctaacaattcaaatcaagtcaaaaccagaacaaaagtgccaatgcaggcatgctgtgggtgatcaggccacgcttccactcagatggagtggggcaagttccaaagactagtcttactaagtaaagccaagtcaaaaccaggacaaaagtgccaatacaggcatgctgtgggtgatcaggccacgcttccactcaggtggagtggggcaagttccaaagattagtcttaccaagtttcagatgtctggactccaagtgccagttccttcctggtgttcagccactgcgttaatcctccgtgggggcctgctatgcaccgctctggcgaggcattccattggggcaatttcctacccaggagcgctctttggatcgtgtcactcaggctggccagagtcccccgcggggatgctccacagggcaggcctaagccacctaaagggctgcctcggccatccatcagttacctcattttcaggtcagggaaccaagaaaagtagcaggatgagcctcagacaaaacctctcagacactgagttgcagaaggaagggctttattcagctgggagcatcggcaagctactgccttaaaatctgagctcccctaatgcacaatttctgtcctttttaagggctcacaacactaaggatttcacatgaaacggtcgtgattgatttgagcaagcagtgggtatgtgacaggggctgcatgcaccggtgttcagagtggaaaagaacagagcagggagtttcacaatgttcttctatacaatgtctggaatctatgaataacatcagtttctaagttatgagttgatttttaactactgggtttaggccaggcaggcccaggcctggtttcaggcctggcgccgggctgcctgtctttgatttcacttccttgtttttttcctaaaacaggtactgagtataaaacaatataaaacaatatgagagggtctctctcttccctcaaaactactaaataaattcagtggatttgcacaatacaatatcggcaccaaaaattacttgaatttccacacattaacaataaacaattttaaaagaaaatttaaaaacacttccatttgctagagaacttaaagtaagaaatacttaggaataaacgtacaaagctgagaagtttgtaccttgaaatctataaatgttgatcaaaatgattaaaaacatacatagagatacaacccatattgatagtttggaaaaattaatattgttaagtaattatataacccaatgtgatttagattcaacacggtacccataaaaatgcctatcagttgacattccaccacaaaagaagtgaaattggctggtccctgccttaactgatgacattaccttgtgaaattccttctcctggctcatcctggctcaaaaactcccccactgagcaccttgtgacccccacctctgccagccagagaacaaccccctttgattgtaactttccactacctacccaaatcctataaaacggccccaccccatctcccttccctgactctcttttcggactcagcttgcctgcacccaggtgattaaaaaaaaaaaaaatctgtatctgtttttgttaaagaaacaaaaaacaggctgggaaaagtggctcacgcctgttggccacactagtctcaaactcctgacctcaagagatccacccaccttggcctcccacagtgctagcattacaggtgtgagccaccgcactcagcctaatcctcttaacataaacactttaatgtcaattaatgcttgaactcaacgttaagtcaactcaaactcaagtcaatgctgaactgactctagtgtcaattaatgcttgatggtttgctatactcattgcattcggaactattatctcaaaaataaattttctgatattctgcaaggagtgatctcagactgaagaccttgccacactgatgacatttgtaagatttctgtccagtatggattctttgatgtctaatgaggtgtgaacgtgaagtaaaggctttgctcacaatcatcacacttgtgaggtttctctcctgtatgaattctcctgttttgcataggatgaagcttgactgaagaccttgcctcaatcatgacatttgtaaggtttctctccagtatgagttcacccatgaactacagcgtatgaacgatgtctgaaaaatttgccacatttactacacttgtaagatctctattcattatggattcttcaatgatttgcaatggttgtagcgttactgaagacttggtgacaatcattacattagtcaagtttccctacaccatggattgcctgatggtgaataagtgttgactgtgcacgaaaggctttgccacactcactacacttgaaaggtttctctccagtatgaattctagtatgttgtgccaggtgtgagtaacacttgaaagccttgtcacaaaccttacatttgtatggtttctctccagtgtgaactctctgatgttgtgcaaggtatgaatcacgcccaaaagccttgtcgcaaaccctacatttgtatggtttctctccagtatgaactctcctatgtatttcaaggtgtgatttgatattgaaaactttgtcacattcttcacatttgtaaggtttctctccagtatgaagtctatgatgacatgcaagttgtgactgtgtcctaaaaaccttgccacattcattacacttgtaaggtttctctccagtatgaagtctatgatgatatgcaaggcttgatttgtgattaaaacttttgccacattcattacacttgtaacgtttctctccagtatgaatgaccttatgcattacaagagatgaattttgaacgaaggtcttgccacactcattacacttgtaaggtttctctccagtgtgaattacagtatgttgtgccaggtgtgaatcacgtctgaaagccttgtcacaaaccttacatttgtatggtttctcaccagtgtgaattctcctatgtctttcaaggtgtgatttgcgactgaaaactttgtcacattctttacatttgtaaggtttctctccagtatgaagtctatgatgacgtgcaaggtttgattgttgattgaaaaccttgccacattcattacacttgtaaggtttctctccagtatgaattgtcttgtgaactaagagggctgaattttcaccaaacgttttgccacactcattacacttgtaaggtttctctctagtgtgaattacaatatgctgtgccaggtgtgaatcatgtctgaaagccttgtcacaaaccttacatttgtatggtttctcaccagtgtgaattctcctatgtctttcaaggtatgatttgcgactgaaaactttgtcacattctttacattggtaaggtttctctccagtatgaactctatgatgacgtgcaaggtttgattgttgattaaaaaccttgccacattcattacacttgtaaggtttctctccagtatgaattgtcttgtgaactaagagggctgacttgtcactgaacgtcttgccacactcattacacttgtaaggtttttctccagtatgacgtctataatgacgtgcaaggtatgcttttttattaaaaaccttgccacatttattacacatgtaaggtttctcaccagtgtgacatctacgatggtgtgcaaggtatcgcttctgattaaagtctttgccacatacatcacatttatattgtttctctcctagatgaattatctgatgttttttaaagagtgagctacaattaaaggatttgccactctcattaaattggaaagatttttctttcctgtgtacatcctgtttctgtgtgagtaatgaagaatggaagaaattattcccatagttattagaaatatgggttttgggcctacaagaaattctttgggatgttgaaactgaggaagcattgttgatagacttctcaagttgattaccaattttcccttcgggctgaaatatgtgcagttcaggcagatgtgaatgaaagcttgatccaagctgatatttaataggcttgtttccagcatgcctttgatcatattggtctgtactacccgtcaactctttgatttctgtcatgggtgcttcatggccatttgtttcatcttcttgccactgaaacacaaagtcatgaatgtctttctcaatttcctggaagcaacattctccaatgtgatgacttgccagtctttgcaatgtccctgtgtggatcacttctgtattgcctttccctattgatgagaactccatcatgcatttggaagagatatctacaaaatataaacgccaatagttttccaattcagtacagataatatataatactgaaacgtgtaaatatgacaccaaaaacaatacttattttaaacatctcaaacatgagcttcaaagttcaggaacacaaaaggaggaagatcctttaataaatgaagggcgattacatgtacttcagatcatttctatggaagcctatttctaatatcatgacaaaacactgacagggcacaaacatgtgtaagcctaaagtaaggagtatttttccattgtgaccttaaagtgtgtcacagtttgcaaaaaatttatcactgtaacaacaaaaagaagaaaatatatattcttcatatttacagcatatttactgtatagaaataaatgctaaaggaccggacaatgtactatattggtaaataatcaacaacaagctcttgtaaggataaccaaaatcaatggaaatcctgtactgtcaaaccatcacagcacagagaagataataaaagattacaaaaattagccaggtgttgtggcccgtgcctgtaatcccaggtactcgggaggctgaggcacaagaatcactttaagccaagaggcaaaggttgcagtgagccaacatcgcaccactgcaccacagcctgggtgacaaagtgagactcgagtcaaaaaaaaaaaaaaaaaaaaggcagggcttggtggcccacaccagtaatcccactactttgggaggccgaggcaggtggatctcctcagatcaggagtatgaccagcctggccatcgtggcaaaaccccgtctctactaaaaatacaaaaagtagccgggcgtggtcgcgggagcctgtaatcccagctacttgggaggctgaggcaggagaattgcttgaacccgggaggcgaagatagtggtaaactgagatcgcaccactgcactccagcctgagcaaaaaagtgagactccatctcaaaaaaaaaagaaaatgttaataccatatttttctgaataactgttacaaaattacctatatccatgtggaacaggcgctttgtaactttttaaaaaaaatttttgtatttttttttttttgagatggagtctcgctctgtcacccaggctggagtgcagtggcacaatctgggctcactgtaacctcaacctcctgggttcaagcgagtgtcttgcctcagcctcttgagtacctgggattacaggcacacaccaccatgcccagctaatttttaaatttttagtagagatggggtttcaccacgttggcaaggctcgtctcgaactcctgacctcaggtgacccacatgtctcagcctcctaaatcctgggattacaggcatgagccactgcgcccgggggcacttttgacattaatgagtggaatctctcagttatattgcataccacgtaccaaaaactcacatgtaaaatcataaaatcaattaataaaatatattattaattcattaatcaaataataaaatactgtaacccatgataaaacaagcaagaaaataagtagatttatactgcctgcagaattctaaacaattccctcttaagaaaaaaaccacaacttgttcttaccaccagtacacaacataagaacagaaatacatgttaagatcactaccttctaatatatgaggtcaagaaaatacacagcattataaggaataagaattgactatggccaggcatggtggctcatgcctgtaatcccaggactttgggaggccaaggcgggtggatcacccaaggtcaggagttctagaacagcctggccaacatggtgaaaccccgtctcaactaaaaatacaaaaattagccgggcgtgtaatccccactacttgggggacccgaggcaggagaatcactcgaccctggaaagcggaggttgcagtgagcatagactgcaccatcgcactccaaccttggggactagagcgagacttcgtctcaaaaaaaaaaaaaaaaaaaaaaaaaaaagaactgaataacaccagggcgcggtggtgcatgcctgtaatcccagcacttttggaggctgaggcaggtggatcatgaggtcataagttcaagaccagcctggacaacatggtgaaaccccatctctactaaaaatacaaaaaaaattagctatgcatggtggcgggtgcctttaatcccagctacttgggaggctgaagcaggaatcatttgaacctgggaggcggaggatgcagtgagccgagaccatgctactgcactccagcctgggtgagagaatgcgactacatctcaaaaaaataagataaataactacttctcaaataagctttggtagatgtggtattctctaataggatgttgctgcagatgcagacttggagagaatttagccatgggtgttgactacctgtgaatactaaaagtgcatttataaagagacattaaagagctcattgcctgttcctctttccaccatgttaggacatggcaggaagatggctgggctaaaccatgaagaagcctctcaccaggaacttatttggctggcaccttgctcttggatttctcccttcccaaattcatgaaaaataaatttctgtctcttaagcctcccagtgtaagctatttcctcttttgtctttgagattgagtcatgctctatcacccaggctcaagtgtagtggcatgattctcctacctcaagtgattctccctcctcagcccagagtctcactctgtcacccgggctggagtgcagtggggtgatcttagctcactgcaacctccacctcctgggttcaagtgattctcctgcttcaacctcccaagtctgggattacaggtgcacagcaccatgaacagctaatttttgtacttttagtagacacgggatttcaccatgttggccaggcttgtctcgaactcctgacctcaagtgattggcccgtctcagcctcccaaagtgctggaattacaggtgtgagcaattgcacctggcccatttttggcatttagtatatttgaggtttcaccatgttgtacagactggtctcaaactcctgacctcaagcaatctgcccaccttggtctccgaaagtgctgggattagaggagtgagccaccacagccagcagtctaagctatttctttttgttttcttttcttttttttttttttgagacggagtcttgctctgtcgcccaggctggagtgcagtggcatgatctcagctcactgcaacctccatctcccgggttcacgccattctcctgcctcagcctcctgagtagctgggaccacaggcgcccgccactatgcccagctaattttttgtatttttagtagagacggggtttcaccatgtcagccaggatggtctcgatctcctgacctcgtgatcctcccaccttggcctcccaaagtgctgggattacaggcgtgagccaccgtgcccagcatcagtctaagctatttctaacaggacagtgaaatgacagaaacaggaaaaagagcatcttatcatcaacatcaccgaaggctgacaaatcttattaaacaaaggaagttaagagcctgtgctgtaagacttgcaataaatgaagtcatctaatagcagtaacatattttattttattttatttatttttatttttttaagatggagtctcactctgtcgcccaggctggagtacagtggtgcaatctcagctcactgcaagctctgcctcttgggttcaggccattctcctgcctcagcctcccaggttgctgggactacaggcacccgccaccacaccctaattttttgtatttttagtagagaaggggtttcaccgtgttagtcaggatggtcgcgatctcctgacctcgtgatccacccgcctcggcctcccaaagtgctgggctcacaggagtgagccactgtgcccggcctttatttttatttttttttgagacggaatcttgctctgtcacccaggctggagtgtcgtggcaagatctcggctcactgcaagctccgcctcccgggttagcgccattctcctgcctcagcctcccgagtagctgggactacaggcacctgccaccgcgcccggctaattttttgtatttttagtagagatggggtttcaccatgttagccaggatggcctctatctcctgacctcgtgatccgcccccctcggcctcccaaagtgctgggattacaggcatgagccaccgtgcctggccagcaataacatattttaaatacattgagacaggccgggcacggtgtctcatgccagtaatcccagtattttgggaggctgaggtgggaggatcacgtggtcaggagattgagacagtcctggctaacaagctgaaaccccatctctactaaaaaaaaaaaaaaaaaaattagcccagcatgttggcagtcacctgcagtcccagctacttgagaggctgagacaggagaatcgcttgaacctgggaggtggaggttgcagtgggccgagatcacaccactgcactttagcctgggtgacagactgagactctgtctcaaagaaaataaaaataaatgaaagaaggctaaagagtaactccaacccagaagcatatacaaagttctccagtaaaggtaaattaaaaaacagataggccggacatggtgactcatgcctgtaatcccagcactttgggaggatgagccaggcagatcaactgaggtcgggagtttgagaccaccctaacctacaaggagaaaccctgtctctactaaaaatacaaaattagccgggtgtggcgatgcatgcctgtaatcccagctactccggaggctgaggcaggagaattgcttgaacccgggagatggaggttgtagtgagccaagatcgcaacattacatttcagcctaagtgatgagagcaaaattatgtctcataaacacataaattaattaataaaaggacagatacagaaactggcatatgtgtaccttttcttcataactaaacttttttcatattatttaaaagtcatgaaaaaacactgtaaatatatgttaatgaaaatgcaacatatacagaaataattctggcataaatttaaaaagttctactggagaagaagtagtttttgcaggttatggattcttttttttttttttttttttttgagatggagtctcactctgtcacccagcctggagtgcaatggtgcgatcctggctcactgcaacatccacctcccaggttcaagtgactctcctggatcagcctcctgagtagctgggattacagctgcccaccacagtgcctggctaagttttgtaattatactacagatgaagtttcagcatgttagctagccgggttctgaactgacctcaggtgatccgcccccggctcagcctcccaaagtcctgggattataggcgtgagccactgtacccggccaggttacagaaattttaagtttcattattatactataagtttaagatgtttaacatacctgcaacaataacctctgcccatatatctatacgacacacttcacttctgcgtactgaaaggaatggacactaacgtggttgttatattcacactggaatcatgcttaaaccacttatatgtttactaagaactaaaagacaaaactatttaaaataataacggttgggcatggtggctcacgcctgtaatcccagccctttgggaagctgaggcaggtgaatcacttgagataaggagtttgagaccagcctggccaacatggtgaaaccccatctctactaaaaacacaaagttagttgggcatggtggtgagagcctgcagtcccagctacccagaaagctggggcacaagaatcctttgagcccaaaaggcggaggctgcaattagccaaaattgcaccactgcactgtagccttggcgacagagtgagactctgtcataagaaaagaaagagcagagagataagtgagggcaaagaaagatgtcctttcaaagatctcaggattgaaactttcctttacccacagaattctcccacttgcagagagtttccccacacactatttgaaggtggagcttccactctgcccatctgagctcttacctgcgtttacacctgtaatatattcccacccatctggacttttttgctattttcacttcactctccacagtccagggctctttcccttgctccaacatggagataacaggtcagagactcctacttataaaaagaaaggaccatgaagtgctggagcttttctagagtcccagccctatgtttcagtaggaaagaagacattgcagatagatctaggaaaatatttctcaaattcctccactgactgcctcattctgaatgcttggggagcactgtaatatgtagtatgtggacatcgagctctcttccaagaactacagaatcgaaagcacaggagaagcaaacagggaactggatatctttaaactctgcagtaaggttttgtttttgttttttgagacagagtcttgctctgccatctgggctggagtgcagtggtgtgttctcggctcactagaaccttcacctcccgggtttgagtgattctctttcctcagcctttctaggagctaggattacaggtgtgtgccaccatccctggctaatttttgtatttttagtagagactgagtttctccatgttggccaggctggtctccaactcctgatctaaagtgatccacatacctcccaaggtgctgggatgacaggcgtgagccaccatgcccagcctgccataaagttttatgcctactttagtcctggaacccacattgaggtatcatgaagaatgcagaacatctaaacaaaggggacagtgaaagtccagatgctacatcatgaagcttttcatttcaaaatcaatacagcttccattttagtcaagcaaggatgcaactcccaagagaaacaagagaaaatgcaaagatccacaagggaacatccccaggaaggaagttatcctcacccagggagaccaggttcctataattctccagcatcacgtctctgtatagagtcctctgagcagggtccaggcatttccactcctcctgagagaattctatggccacatccctgaatgtcaatagaccctgaaatgaaaacacattttaaccaaatggttatgagaggagatcttatctttacagaaaatgagaagaagagaggggaaagcatggatttaattgtagtgaatgttctgacaaatccgagtaagggattcttcaccacatgatgtattttttttcttctttttctgtttgagatggagtgtcgccctgtcgcccaggctggagtgcagtggcatgatctcggctcactgcaagctctacctcacaggttcatgccattctcctccctcagcctcccaagtagatagtactacaggcatctgccaccatgcctggctaatttttttgtatttttagtagagatggggtttcaccatgttggccaggatggtctcgatctcctgacctcgtgatctgcccacctcggcctcccaaagttctgggattacaggcatgagccaccatacccggcctcacatgacgtctttattatactttttgaagaggtcaagacaccctgtcagtatgaatttcttatgtttgtaaaaaatataagaaataaataaaaaatcagtgcagggttcctgctatagaaatgtttgaaacttttatggacacaccaagtgacattcagtatctcgaagagacagagcatgagtgatgtcttcacagatgacaacgtccacagtaaaagatcagccaggtgcagtgacacatgcctgtagtcccagctatgtgggaggctgaggcaggagaatggcttgatcccaggaggcagaggttgcagtgatcccagatcacgtcactgcactccagcctgggcaacggaaactaggtctcaaaattaaaaataaaaaatcagccgggcatggtggcaggcacctgtggttccaattactttgaaggctgaggtgggaggatggcttgaccctgagggtagaggttgcagtgagctacgatcatgccagggtgctccagcctgggcaacaaagtgagaccccgtctcaaaataaaataaaatacatgaaaacaaacttactcaaagtacaaaatccattttttaaatgttcacaaaataataaaacctacacagactcacaaaaaactagatgttaatacaaagggttgtcatttgtcccagattttcaaaatataaaagattttcaaaatatatatgtgtgtgtacatatatatgtgtatgtacatgtgtgtgtgtacctatatatgtgtgtgtatatgtgtggggatgtgtgtatatatattatatacatacatacacatatatatgtattatatacatacatatacatatacatatatatatatatatatatatatataggttttaaatatataaaaagtagcaagttttgtttaagtgaagaggaatctcaccttggcggaaaaggacacattgacaactgggggctggggggaatcttgtcagatctaagaaaacaggaaatgccccatcctagaggaagcaatcaccctttcaactgcctggcctggaggatgaagaatcacttgaacccgggaggcaaagtttgcagtaagccaagatcatgccactgcactccagcctgggtgacagagcaagactccgtttcagaaacaaacaacagaaataataataataggtggaatgagaatatagctttatcctctagaataaaaaaaaagtactgctcccatatttgagaaaaattgtaatcatttttaccaaaagcctgtttcacgagcctctccatagtaacaccactgtctccatgagcgtaatatgctaagaatggttgaatgaatctcctgctattatttatgttgattccatattcttaacataatgatggaatcattcatgtatcattcatttccattatatttatttatttatttaagacagagttttgctcttgttacctgggctggagtgcaatggtgcaatctcaggtcactgcaacctccgcctcccgatttcaagtcattcttctgcctcagtctcctgagtagcagggattgcaggcacacaccaccatgcccagctaattttgtatttttgctagagacagggtttctccatgttggtcagactcactcaattacctaaaaatgtagtttaatatcaggcagaaaacatttcctcttatcggtcttttctagaatttaccatgttctttgtgcacattaatatgtgacttccattggcagctactctaatcttggtccacagaaaactgacagtgcatccagatgcggccctgaacaatccctgccgcccaacaccactgacaccataggaccctcaccccgtctccatccatgtctgtgtgtgagcccttcccaggaccatgcctactgcaacctcttctcatgttcatgtcattgggtcacgagagatggaatctaggtgagatgagagggactgagggaaggcatgggtgagtgtgagcaaacctgtcacgcaggatgcttcagactcagagaagtttcccaactccaaggcccagcatttctgaaaggaaggagacagaacaatccacagagaatatcatctcacctgaggaagagccatccctgactcctttgctttcctcttcctcttctgagtttcttcttcacatacccagagtctttagaagtcaatcatgaatgttagaaatatgttgtttattgctcagagtcaacataccccctccctgtaaaacaacgacacatacaaaggagacctcaccctgggaaatatggtccactctgctgcccaccataccagggacaataaactcctataggaaaactcccactccccttctggagaagcccacacacacgctgcagcagtagggatctgggctggaatgagctccccttcaaggcacagacccagacctgaccaaaccacttgcagaggctgggtgcggtggctcatgcctatcatcccagcactctcggagaccaaggtaggtacattgcttgagctcagaagtttgagaccagcctgggcaacatggtgaaactccttctctatcaaaaatacaaatacttagccaggtatggtggtgcacatctgtgtttctgtcaccccagctacttaggaagctgaggtggaaggatcacttgaggtcaggagtttgagaccagcctggcaaacatggtgaaaccctgtctgtaccaaaaatataaaaattgggtcaggtgcaatggctgaagcctgtaatactagcactctggaaggccaaggtgggtggattacttgaggtcagcgttcaagaccatcctggccaacgtggtgaaacctcatctctactaaaaatacaaaaagtagccaggctttgtgggcatctgtaatcccagctacccaggaggctgaggttggaggatcacttgaacctgggatgtgaaggttgcagtgagccaagatcacaccattgcactccagcgtgagtgacagaataagactctaaaataaaataaaatacaaatacaaatacaaaaattagccatgtgtcgtggcacacacctgtaatctcagctacttgggaggttgaggcacaagaatcacttgaacccaggagacagaggttgcagtgagccaagatcatgacagtgcactcacagcctggaggacagagtgagactctgtttgaaaaaaaaaaaaaatctccctctccctccccctccctctccctctccctctccctctccctctccctctccctctccctctccctctccctctccctctccctctccctctccctctccctctccctctccctctccctctccctctccctctccctctccctctccctctccctctccctctccctctccctctccctctccctctccctctccctctccctcctctcgctctccctctccctctccctccacggtctccctctgatgccgagccaaggctggactatactgctgccatctcggctcactgcaacctccctgcctgattctcctgcctcagcctgccgagcgcctgcgattgcgggcgcgcgccgccacgcctgactggttttcatgttttttttggtggagacggggtttcgctgtgttggccgggctggtctccagctcctaaccgccagcctcggcctcccgaggtgccgggattgcagacggagtctcgttcactcagtgctcaatggtgcccaggctggagtgcagtggcgtgatctccgctcgctacaacctccacctcccagccgcctgccttggccccccaaagtgccgagattgcaggctctgcccagccgccaccccatctgggaagtgaggagcgtctctgcctggctgcccagtctggaaagtgaggagcgtctctgcccggccgccatcccatctaggaagcgaggagcgcctcttccccgccgccatcccatctaggaagtgaggagtgtctctgcccggccacccatcgtctgagatgtggggagcacctctgccccgccgccctgtctgggatgtgaggagcgcctctgctgggccgcaaccctgtctgggaggtgaggagcgtctctgcccggccgccccgtctgagaagtgaggaaaccctctgcctggcaaccgccccgtctgagaagtgaggagcccctccgtccggcagccaccccgtctgggaagtgaggagcccctctgcccggccagccgccccgtccgggaggtgaggggcgcctctgcccggccgcccctactgggaagtgaggacccctctgcccggccagccgccccgtccgggagggaggttggggggtcagccccccgcccggccagccgccctatccaggaggtgaggggcgcctctgcccggccgcccctactgggaagtgaggagcccctctgcccggccacgaccccgtctgggacgtgtgcccagcggctcattggggatgggccatgatgacaatggaggttttgtggaatagaaaggcgggaaaggtggggaaaaaattgagaggccgggtggttgccgggtctgtgtggatggaagtagacatgggagacttttcattttgttctgtactaagaaaaattcttctgccttgggatcctgttgatctgtgaccttatccccaaccctgtgctctctgaaacatgtgctgtgtccactcagggttaaatggattaagggcggtgcaagatgtgctttgttaaacagatgcttgaaggcaaaaaaaaaaaaaaaaaaaaaaaaaaagaaaaaaaaagaaaaggaaaaaaaaaaaaaaaaggaattatttgtcacttactgtctctctaagggcagccattgtaagacctcaaagaaactttagcctccacaatcttttctcttaacctgaacatttcctttctatggatcccaggtttttagacaaactcaaccaattgtcaaccagaaaatgtttaaatttacctatagcctggaggcctgcccaccacccctttgagttgtctcgcccttctggaccaaacaatgtctttctttaatgtatttgattgatgtctcctgtctccctaaaatgtataaaaccaagctgcgccccgaccaccttgggcatgtgttcctgggaccccctgaggctgtgtcacaggtcagggtcactcatgtttggctcagaataaatctcttcaaatattaaaaaaaaaaaaaaaaaaaaaaaaaaaaaatcttcatttctgatgtggttgatgcagagataataaacctgagtaacgtgatagagactgatgggcagagggaacttcagatggcagtgggaggacatgggagatatctctgagcctagatctgaaggaggagaaagggacagggctgtcaccatttagggacataggataagagcaggacaatgacctgagacaggaagtattttgatatctgggaaaagagaaaagcaaatgtgactggggcagagggattcatgagatgggggcaagctcccaggaggaggctggacactggcaggggccctggacacagggctgtggagccacagtgaggagatgggcttttgtcctggggaacacaggaagccagtggagggttccctgccagggaatgacatgacttactttagatttagctgtgatgtcctcacagtgaaaacattttcaccgagttaccctgagaaggtctgagatgagtaagaagatgtgcctgaattcttacatgggggcctggaagggctaatgggaagggttggtctttatcaccccatccttgaaaattagagaagcatctttcacatacctgggctaaagaaacttcttttgcaaggttctgatgccattaattcctaacatttaatttttccttacaagaaaattacagtaacatttacaaaatgcaaaagtgtaaacacacagctattgaccttgaaaatagggaggccgaggtaggtggatcacctgagttcagcaattgtagaccagcctgacctacatggaggaaccccgtttctactgaaaatacaaaaattatccaggcatggtggcgaatggctgtaatcccagctactcagcaaggctgaggcaggagaatcacttgaaccagggaggtggcgattgcagtgagccaagatcgtgccattgcacttcagcctgggcaacaagagcaaaactgcatctcataaaagaaaagaaagaaagaaagaaagaaaagaaaacagggaaagagagtcagctgttgaactaagacagaagtaacttttttcattcaagaatacataggtggccaggtgtgatggctcacacctgtattcccagcactttgggaggtcgaggcaggtggatcacctgaagtcaggagtttgagaccagcctggccaacatggtgaaatcctgtctctactaaaaatacaaaaattagctggactccatccacagcttatttaacctcttgttgctccttttccccaatctttagattgttctcaatgtccatagatttccacctcttctcccatctctcctgagctctccctgttaaattctctcttccccgttatacccccctggccccactctctggcaccccagatttcccaggtgtcctccctgctgtggttctccctctgttctccttgccaccagcaccactctgctctgtctgccctggctccaaatccctcctcctctccctcattctcatgagcctttctgtttgctgcccctctccctaccttgctgtctgtccttcatctctctgtacatccagcttttctctacatttctccagttgcttttctcctcctgctttgttatcttttgttttttcacttttgctgtctcttggcaaatccctgaccatcccctactttgccatctgttatgggtctttctccttcttcttttatctgtctcaggttttctactgctctctgattccctctctctgtctcctgatccctttggcccacacaatcacaggagggtttggagtaagacgcctgcatcccagagaagcgcattttccaggggctggagctgggcaggcaagaacaccccgtgtcacaggacaggccccgggtacctccccaacgcgggctcagggaaagcggtgactgcggaggggagacttggggagcaacagggcccggcatgaggagggaggtgggggggagatgacgccttcggacaagggtggggtccgcaggatcccaccaccgggcagagaacgcggcctccctgggactgtggtgtcagcgctgggctccaggggccgacgagggtgaggctgggaagcgccagagcagggatccacctctcgggtgaggactttaaaaagcgcggggtgggaggagtcaacaaacggttgtgaacgggaaaactacgcgatacaaactgtatacattgccctatagcaaaaagaccgaggacagggcagcctcagggcgactttaaacccaaaaggaagtgacttccggactcctaggggaatgtctccatttgctcttgttgaaggaagaagggcgagaatttccaggtctgtggagaccccacatcccaggtacagaattgccggggacctggaggcacagcctcaatacaacacagagcaaaactcaccgccgcagtgtgacttccagtccacgcgatccgcttcctggtccgggcgaatctacaagcacaggacagaagccaggcctccgtggagccaacgaggtgggcggggcctgggcgaggtaggggcggggcctgggcgaggtaggggcggggcgccaggcggagagacctgccctgtagaaccggcagacgcggggcgggggcggatctgtgcttctctcagccgcgtacctagccgctgtttttcgggttttggtgagggaagagacagaccctctcatattgttttatattgttttatactcagtacctgttttaagaaaaaaaacaacaaggaagtaaaaccgaagacaggcagccctgcgccacgcccaaaaccaggcctgggcctgcctggcctaaacccaatagttaaaaatcaactcataacttagaaaccaatgtttttcatagattccagacattgtatagaagaacattatgaaactccctgccctgttctgtttctctctaccagtgcacgaaacccctgtgtatatatctgggactgtagtccctgttacgtatcccctagattgctcaatcacgacccttttatgtgaaatctttagtgttgtgagcccttaaaagggacagaaattgtgcacccggggagctcggattttaaggcagcttgccgatgctcccagctgaataaagcccttccttctacaactcggtgtctgagaggttttgtctgtggctcgtcctgctacaccggaggcaagagtggccaggaaggctgaggcatgattcaaaagccctggaattgtctggaacagggatgcaaactagaacgtgaaatgcaaagccctgcctaggcagaaagtacgatctcatgctgatggtacacagaacagaatagaaatctctccctttctattctccatttgcttcggagggagagtccaccctgtgctcagcttcagagacttccctagggccaccgcctgggatgccggagggagtgttcaggccagggaggagtgaggtcaccacctgctacttaaacacagcagaaatgtggaagtgggggcgggagcctgaggtccagctactcaggaagcagtggcgggaggatcattgagcccggaggtccaagccagcctgagtgacaaagtaacaccccctgccgcagggatcccttcctcatctcttttttttttaatttttaaaataaaattttcattgtgtgagatagggatccaactttattcttttccatgtggatatccagttagttgtcccagcacaattgtggatgacatctattagtttcttttttttatttacttttttttctttttcttttttttttttgagacagagtatttctctgtcacccaggctggagtgcattggcaagatctcggctcactgcagcctctgccttctgggttgaagcaattcttctgactcagcctgcatagtagctggtattacaggcacgtgccatcatgcccggctaatttttgttcttttggtagagacagggtttcaccatgttggccaggctggtctcaaactcctgacttcaagtgatccgcctgcctcggccttccgaagtgctgggattacaggcgtgagtcaccgtgccgggcccaagaaatactctttacttcactttttaaatgttgagaaaatacaattgaaaactaaaaaatcttccccagatgaaaaatcatcttcactatgataacagagaaggaaataacaaccattttattaataaagagccttagacctgaatgtaatgggaaatagaggcaaacagttgagaggttgaaaacagagagagaaacttcactgttctatacaacccattaagtacatgttttcttttgtcttttttctttcttttttttggagacaagagtctcactctgttgcccaggctagagtgcagtggcaagatctcagcttactgcagcctccacctcctgggttcaagcaattctcctgtctcatcctcctgaatagctggaactacaggcgtctgctaccatgctgggctaatttttgtatttttagtagagacggagtttgacctttttggtcaggctggtctcaaactcctgacctcaggtgatccacctacctcagcctcccaaagtgctgggattacaggcgtgagccaccgcgcccagcctaagtacatgttttcaagataaacactaatcagtcctcagggaagaggacttgacaatacccttggtcacacatagttcatcctggctctacttggtaatggaggtgaccatttgtgtcagctaattagcttcatcctgaggaaggggggaaaacgctaacccatgtctttttgacaagtgtgagttttacaacatggcgacaggtgccatctctagtgaggctcctacaatccgacagaaaccgacatcagcagtaaataataaaatttagaatacatgattaagtatagagtttatgtgaacacaaaacttgaggatagccacctggaaacatcaactccaaatgaagggggtctgtgttcccaagtagagatgttaaggtttcacacacagggaaagacagagaagctttaccagaatcaacacattttccattcaagaccagtggataagttgcagcaacttgactggtgatggattgatacagttcaagaaaggttactttatcactacataagaagggacaatcggccaggtgcggtggctcacgcctgtaatcccagcactttgggaggtgaggcgggcagatcacaaggtcaggagatcgagaccatcctggctaacacagtgaaacccatctctactaaaaatacaaaaaattagccgcgtgtggtcatgggcgtctgtagtaccagctacttgggaggctgaggcaggagaatggggtgaacccaggaggcggagcttgcagtgagctgagattgcacccctgcactccagcctgggtgacagagagagactccgtctcaaaaaaaaaaaaaaagaaaaaagagggacaatgatgtcaagaggtcttgtctctggggctgctcagtcttcctaattatctacaggaaaacttttgtgtttttttcttttctttttttttttgagacagagtttcgctcttgttgcccaggctggagtgctatggcactatctcggctcaccacagcctccgcctcccaggttcaagcaattctcctgcctcagcctcccgagtagctaagattacaggcatgcatcactacgcctggctaattttgtatttttaatagagacggggtttctccatgttgaggctggtctcgaactcctgacctcaggtgatctgcccacctcagcctcccaaagtgctgggattacaggcgtgagccaccgcgcccggccctctttttttatttttttgagacagtctcgctctgtcacccaggttggagtgcagtggtgtgatcttggctcactgcaacctccgcctcctgggttcaagcaattcttctgcctctgcctcctgagtagctgggactacaggtgcacaccaccatgcctggctaatttttggtatttttagtagagacgggggtctcaccgtgttagccaggatggtctccatctcctgacttcgtgatgctcccgccttggcctcccaaaatgctgggattacaggtgtgagcctctttgcctggccaaaacttttcttttttaaattgatattaggaaactgaattatatagcttttttttttttttttttttttttttggtacggagtcttgctctgttgcccaggctggggtgcagtggcatgatcttggcccactgcaacttccacctccccggatcaagcagttctcctgcctcagcctcccaagtagctgggaatacaggcgtgccccaccatgccctgtaatggctttgtatgtttactggagacggggtttcaccacgttggccaggctggtttctaactcctgacctcaagtgatccgcccacctcggcctcccaaaatgctgggattacaggcttgagccactgcgcctggccaggaaaactcaaaaaagttgcgcctgcggctgggcgcggtcattcatgcctgtaatcccagcactttgggaggctgaggtgggtggatcacaaggtcaggagatcaagaccatcctggctaacacagtgaaaccctgtctgtactaaaaatacaaaaaattagccgggagtggtggtgggtgcctggagtcccagctactggggaggctgagacaggaaaatgacgtgaacccaggaggcggagcttgcagtgagctgagatcgcaccactgcacttcagcttgggcgacagagcgagactgtctcaaaaaaaaacaaaaaacaaaaaagaaaaaaccttgtgcctgcatgccactggactcttgttgcatgaccacgttcctctcaaggctcagaattatttaaaggtcggtagcttttaatttgaaacatttgatgtttgaattatttaatttcctactaagatacaggtactatctcccttgtttgccttaaaaggatcgctcccaagtccttcagaaatacatccctgggtcattaaactgaaaaaaggtttagttactttctaaaaaataccacttcaggccggacgcgtggctcaagcctgtaaatccagcgttttggaaggccgaggcgggtggatgacctgaggtcaagggttcaagaccagcctgaccaatatggagaaaccccatctccactataaatacaaaaattaaccaggcgtggtggcatgcacctgtagtcccagctacttgggaggctgaggcaagagaaacgcttgagcccaacagacagagggtgcagtgagccaagattgcaccattgcactccagcctgggcaataagagtgaaactccgtctcaaaaacaaaaaattaataacaataataaataaggccagtgcagaggctcgctcaggtgagactccgtcttaaaaaaaaaaaaaaaagaaagaacactaccacttacacagtagggcattctcaaaaacaagggcaacgccacctcttttaagttttgtctttcaagatgtgatttgcgactgaaaactttttcacattcttcacatttgtaaggcttctctctagtatgaagtctatgatgacgtgcaaggtgtgctttctgattaaaaaccttgccacattcattacacttgcaaggattctctccagtatgaattgccttatgaattacaagggctgaatttcaaccaaaggtcttgttatgctcactacacttgtaaggtttccctccagtatgaagtctacgatagcatgtaaaggatgacgtctgactgaaggtcttgccacactcataacaactgtaaggtttcttaccagtgtgacatctattatggcatacaaggaatcaattctgattaaagaccttgtcacatacctcacatttatattgtttctatcctaaatggattatctgatatttccttaagagttagctataattaaaggatttgccactctcattacattggaaagatttttctctcatgtgtacttcccaatttttgtatgggtaatgaagaatggagggaattattcccatagttattagaaatacgggttttgggactacaagaaattctttgggatgtcaaaattaaggaggcattgatgatagacttctcaacttgattaccaattttccattcaggctgaaatatgtggagttcaggcagatgcgaatgaaagctggatccaagctgatctttaataggcttgtttccagcatgcctttgatcatgtcggtctgtactaccagtcaactctttgatttctgtcatgggtgcttcgtgaccattcctttcctcttcttgccactgaaactcaaagttatgaatatctttctcaatttcctggaagcaaaaatctctaatgtgatgactttcatgtctttgcaatgtccctgtgtggatcacttctgtattgccttgcgctgtggatgagaactccttcatcatgcatttggaagagatatctacaaaatataaacaccaataggtttctaattaagtacagatgataaacaatactgaaatgtgtaaatatgaaccaaaaaaacaattcttattttaaactttccaaacatgagcttcaaagtttaggaacacaaaaggagtaagattctataacaaataaagggtgatagcatgtacttcaagtcatttctatggaagcctatttctaatatcatgacaaaacactgacagggcacaaacatgtgtaagcctaaagtatggagtgtttttccactgtgaccctaaagtgtatgagagtttgcaaaaaacatatcactgtctatgaaagaagaaaaaaatgtattcttcatacttacagcatatttactgtatacaaataaatgctgtaggaccatacaatatactatattggtaaataatccacaacaagctcatgtaaggataatcaaaatcaatggaaattctgtattgtcaaacaatcatagcactgagaagataacaaaagattacaaaacttagccttgtgtcatggccggcacctgtattcccagctactcaggaggctgaggcagaagaattgcttgaacctgggagggagaagttgcagtgagccgagatcgcaccactgcaattaagcctgggcgacaaagtcagactttgtttcaaaaaaaaaagaaaacaataaaagaaaatgttaatacaatatttttctagataaatatcataaaattacctttatccatgcagaacaggcactttgtgactttaaaaaaatttggtagttttatttttttgagacagagtcttgcactccaggctggagtgcaatggcaggatctcggctcactacaacctttgcctccacggttgaagtgattctcctgcctcagcctcctgagtagctgggattacaggcacacgccactatgcacagctaatttttgtatttttagcagagatggggtttcaccatgttggccaggcaagtctcaatctcctgacctcaagtaatccacacgccttggctccccaaagttctgggattacaggtgtgagcctctgtgcctggtggcactttgtgacattaacaagtggaatgtgtcagttatattgcataccagatacttaaaagccatatgtaaaatcagaaaaattaataatatattgtaacccatgataaaaccagcaagaaaataagtacatttatatagcctgcagaattgtaagcaattctctcttaagaaaaagtccacaatgtctacttaaccaccagcacaccatataagacctgaaatacatattaagatcactaccttctagaccaggcatggtggctcacgcctgtaatcccagcactttgggagaccgaggcaggcggatcacaaggtcaagagatcgagaccatcctggccaacatggtgaaatgccgtctctactaaaaatacaaaaattagctgggtgtggtggtgtgtgcctgtaatcccagctactcgggaggctgaggcaggagaatcacttaaacccgggaggtggaggttgcagagagccgagatcgcactactgcactccagcctggtgcagagcaagactccgtctcaaaaaaaaaaaaaagcccactaccctctgatgtaggaggtcaagaaaatacacaacaatgctgggcacggtggctcacacctgtaatcccagcactttgagaggccaagtcgggcagatcacgaggtcaggagatcgagaccatcttggctaacatggtgaaaccctgcctctactaaaaatacaaaacgttagctgggcgtggtggtgggcacctgtaggcccagctactcagaaagatgagacaggagaatggtgtgaacctgggaggttgcagtgagccgagatggcgccactgcactccagcctgggggacagagctagactctatctcaaaaaaaaaaaaaaaaaaaaaaaaagaaagaaagaaagaaaagaaaagaaaagaaaatacatagcattaaaaggaataagaattgactaacggccgggcacggtggctcacacctgtaatcccagcattttgggaggctgaggctggcggattatgaggtcaggagtttgagaccagcctggccaacatggggaaaccccatctctactaaaaacacaaaaaaatcagctgggcatggtggtgggcacctgtaatcccagctacttgggagactgaggcagttcttgtgggtggaggattacccgggtgccgaggcaagagactgaaggcacaaaccatttcagtataataaagaaaatagttagaataagaacaatcacaacacaaattagatacagagatgatcatggacaattatcaatcattattataaacagtataaatctttagcttttaatattactctttgtggcattactaatataacctaggaataactggcgggtatagggtcaggtgctgaagggacatggtgagaagtgacctagaaggcaagaggtgaggcctctgtcacacccgcataagggccgcttgaggggtccttggtcaagcggtaacgccagtgtctgggaaggcacctgttacttagctgaccgcgaaagggagtctcctttccttggaggagtcagggaacactctgctccaccagcttctcgtggaaggctggatattatccaggcctgcccgcagtcatcccgaggcctaaacccctccctgtggtgctgtgcttcaatggtcaagctccttgtccactttcatgctcctcccgtactcctggctcctctttgaagttcatagtagatagcggtagaagaaatagtgaaagtcttaaagtctttgatctttcttataagtgcatagaagaaaatgctgatgtatgctgccttctctctctgcttcggctacctaagagggaagggccccctgtcccgtgatcacgtgactttcttcaccttgtcaatcacttagaagattcaccctgcttaccctgcccccttgtcttgtatgcaataaataccagcgagcccagcctttctgggccactaccggtctcctcaacttgatggtagttgtctcccaagcccagctgttttctctttatctttttgtcttgtgtctttacttactacaatctcttgtctctgcacacggggtgaatacccgctaagccccatagtgctggaccctataagttctatatatatgcattgaagggggcctgaccctccacacctgtgggtatttctcatcaggtgggatgagagactcagaaaagaaagaagacacagagacaaagtatagagaaagaacagtgggcccaggggaccggcacactcaacatgcaaggacctgcatcggcgccagtctatgagtttcctcagtatttattgatcattatttttactattttagcgaggggagtgtagtaggggaacaagtggggagaaggtcagcagggaaacatgtgagcagaggaatctgtatcatgaataagttcaaggaaacatactgtgcctggatgtgcaattaggctagatttttgtttctcttcacccaaacatctcagtgtaggaaagagtaaaagagcagtattactgccagcatatctcgcctccagccatggggcgcttttctcctgtctcagaagagaacgaatgggaatggtcggctttacaccgtgacattccattcccacggatgagcaggagacagaagcctttctcccttttttttttttttttttgagatggagtctcgctctgtcgcccaggctggagtgcagtggcacgatctcaactcactgtaagctctgcctcccaggttcacgccattctcctgcctcagcctcccaagtagctgggactataggcacccgccaccacacttggctaattttttagatttttagtagagacggagtttcaccgtgttagccaggatggtctcggtctccttttcccgtgatctacccgccttggcctcccaaagtgctgggattacaggtgtgagccaccacacccagcctacagaagccttcctcttttctcaactgcaaagaggccttcctctttcactactcctcctcagcacagaccccttatgggtgtcaggctgggggatggtaaggtctttcctttcgcatgaggccatatctcaggctgtctcagtgaggggaaaccttggacaatacccaggctttcttgggcagaggtccctgcggctttccacagtacattgtgccccttgttaatcgagaatggagaatggcgatgacttttagcaggcatactgcctgcaaacatattgttaacaaggcacatcctgcagggcgctgtggctcatgcctgtaatcccggcactttgggaggccgaggcagacagatcacgaggtcacgatatcgagaccatcctggctaacacggtgaaacccgtctctactaaaaatacaaaacaaattagtccggcatggtggcgggcacctgtagtcccggctactcaggaggctgaggcaggagaatggcatgaacccaggaggtggagcttgcagtgagccaagattgtgccactgcaatccagtctgggagacagagcgagactccgtgtcaaaaattaaaaaataaaaaaaaataaaaaaaaaaaaaaacaaggcacatcatgcacagccctaaatccattaaaccttgattcagtacagcacttttctgtgagcacagggttggggctaaagttacagattaacagcatctcaaagcaaaacaatttttcttcatatggaccaaaatggaatttcttgtcttccttttctacatagacacagtaacaatctgatctctctttcttttccccacaatgcattgcccttatatagtttgctatgcataaaatgcaaaacatagaatgtgtactgggaaaatttataaactgagtcagagaaaactttgtagaaaacaaactgcacagcaaaaacaaaaaatatgatgcaggctatctggcctaaatgtttgtattggctaaaagtcattatcagatttcttattctccgataggatgttcctgcagatgaggccttttatagaatttggtcttctgtgttgactgttcatgaataggactaatgcttttatttttattttttctttatttactgatttttgagacggaattttgctcttgttgcccaggctggagtgcaatggcatgatcttggatcaccacgacctcggtctcctcagttcaagcgattctcctgcctcagcctcccgagcaactgggattacaggcatgcgccaccacgtccggctaattttgtagttttagtagaaacgtggtttctccatgttggtcagtctggtctcgaactcccgacctcaggtgatccggctgcctcggcctcccaaagtgctgggattacaggcaagagccacggcgcctggccaggactagtgcttttataaaaaagagacagtaaagtgttcattgcctgttcctctttacaccatgtcaggacacaggaggaagatggctggacgaaaccatgaagaaggatctcaccaggaaccaatctggttgaaatcttgctcttagattttccactttccagattcatgagaaataaatttctgtgtctgaagctttctagtttacactatttctttttttgtctgtttttgagactgagtcacgcttcatcacccagactggggtgtagtggcacgattctcctgcctgaggagattctcccgcctcagcctctggagtagctgggactaaggcacacgccaccacgcctggttaattttttttgttgggggggggagacagagtctcccactgtcacccaggttggagggcagtggcacgatcatggctcactgcagcatagcctcccgggttcaagtgattctcctgtctcagcctcccaaatagctgggattacaggtgcaccaagctcagctaatttctgtatttttagttgagacagggtttcaccatgttggccaggctggtcttgaacttctgacctgaggtgatctgtctttctcagcctcccaaaatgctgggattacaagggtgagccattgcgctcagccaattttattttcatttagtagatttgaggtttcattatgtttgtgcaactggtctcaaaatcctgacctcaagcgatctacccacctcggcctttcaaagtgctggaattagaggtgtgagtcaccgcggctggctagtgtaagctatttctgacagaacagtgaaatgagcgagacaggaaaagaggcatctcatcaccaacatcaccgaaggctgacaaatcttattaaacaaaaaaagtttacagtctgtaccataaaacttccaatatgtgaagcaatctaaaagcattaacttttaaaaaccaggcgggtgaatcacttgaggttgggagttcgagactagcctgaccaatatgtagaaagttcatctctactaaagatacaaaaattagccaggcactgccgggaacggtggctcacgcctgtaatcctagcattttgaaaggccgaggcgggcgaatcacgaggtcaggaattcgagaccagcctgaccaatatggtgaaaccccatctctactaaaaatattaaaaaatagccgagctctgtggtgcaccgtgaggaaaagcaagagagatcagattgttactgcgtctacgtagaaaaaggaagacaaaagaaattccactttgatctgtactaagaaaaattgttctactttaagatgctgttaatctttaacttttgtcccaaccctgtgtcacagaaacatgtgctgtattgactcaaggtgtaatggatctagggctgtgcagggtgtgccttggtgaaaatgtgtttgcaggcagtatgcttggtttaccactgccattcattgccattctccattctctattaaccagagacacaatacactgcggaaggccgcaggaaaccctgcccaagaaagcctgggtattgcacaggtctcccccgactgagacagcttgagatatggcctcatgggaagggaaagacctgactgtcccccagcctgacacctgtaaacggtctgtgctgaggaggattagtgaaagaggaaggcctctgtgccattgagataagggggaagcatctgtctcctgcacgtctctgggaatggaatgactcagtgtaaaaccgaccagacattctattctgagataggagaaaaccgccctatggctggaggcgagacatcatggcggcaatactgctctttactgcactgagatgtttgtgtaaagtcaaacataaatctggcctacatgcacatccaggcacaacacctttccttaaacttatttatgacacagagtcttttgctcacatgttttcctgctgaacttctccccaccatcaccctatagtcctgccacattcccctctccaagatggtaaagatagtgatcaataaatactgagggaactcagaggccaatgccggtgcaggtcctcacttgctgaccgccggtcctctgggctcacttttctccctctgtactttgtctcttttctcagtctctcacctccaccttgtgagaaatatccatgggtgttggagggacaggaccccttcacaaagtggtagaactatgggcgtgagccactgcacccagctacacatttacattatagcatcttgaccttcggctccccagctgccttgtgactcggtgtgtgtgtgtgtgtgtgtgtgtgtgtgcatgctcgcgtgttgtgacaggcaagaaaaagccactagagcatcatcgccactggcctggtaggaggaggttgcccttgggctgcagttcactgtgctgtttgcactcttgatccttggaagaatcttcctgaagtcacggagcctccagctcctctggaacagaactagttgtgtaggagtgtgtccttcatgccctcaggtccctgaccttctccccacccttcctgaagggaatccagaacccctgactctgagctcatcacctgcttgtggcaaagtccctgcccataacggccaaactgggtcctggtgatgtgcagagcacggaagacccaggagctggagtaaggcagtggcacaggtgataaaagtggggatgcctcggcactgcctgaggacacagggtctggcctgtaaggcttttctgaccctagtgaggccttctcttcttattttgactgaaataaatagccacaggaagttcagatcaattagagttgaaatttcaagaagaaatgtgggaccatcctcacacttgccccaggccctgagtcttccctgaggatgcctcagcatctgaactataaccccagagtaggtgctgcagttgtcctgtggccaagatgagaactgtgcatccttcagtgaagggagacacaaaattttcaaaataacccatgcagaaaggtgtttctgggtgggcacggtggctcccgcctataatcccagcacactgctaggccgaggcagacagatcacctgaggtcacgagttcaagaccagcctggccaacatggtgagaccctatctctactaaaaatacaaaaataggagcaggtgagttggctcatgcctgtaatcctagcactctgggaggccgagacaggtggattacttggggttaggagttcgagaccagcctggccaacatggtgaaaccccatctctactaaaaatacaaaaagtagctgggcttggtgggtgtctgtaatcccagctactcgggaggctgaggcaggagaatcgctttaacctaggaggtggaggttgcagtgagccaagatcgtgccactgcactccagcctgggtgacagattgagactcaaaagtaaaataaaattaaattagaattaaaatacaaaaattagccaggtgtggtggcacacacctgtaatctcagctacttgtgaggtgagacacaagaatcgcttgaacccaggagacagaggttgcagggagagatgtcatgagactgcactcacagcctggatgatagagtgagactctgtctcaaaaaataaaaaaataaaaagagcatttctgatgtgactgatgcagagataataaaatctgagtaatgtgatagagactgacaggcagagggaacttcagatgggggtgggagggcatgggagacatctctgagcctagacctgaaggaggaaatagggaaagggccatgataatttagggacatagggtaagagcagggacaatgaccagagacaggcaggattttaatttttgggaaaacagataagcaaatgtgactggggcagagggagtcatgagatgagggcaagctcccaggaggaggctggacactggcaggggccctggacacagggctatggagccacagtgaggagttgggctttcaacatttgtccacatggaccagagggccttgagggaaacatgcacttaatagctcacagctcaagattttaacaatgacataaggaaagaaaactgaaaaacagactaactggttaaaccacattttgatgtcaaaggttgccaataaataataaagagtagaaagcatgcagacctcgatctgaaccggacgcaactaatttcaaacagaaactactttgaaattgttttgtaaaactcgaacaaattcagatgtcaacgggaaaataactagaacatatacttgtacagaaaggaatgatgtgagctgattataggatgccacaaaggcatctttcagaagaagtgattatggattaaaaaaggaatttttaaaattaacatttatctcaaactccaaaaaaaaaaaaagaaagaaaaaaaaaaagaaagaaatgaagaggaaccagaaagaaaaaaaggaaatctattacacaacgagaacaaaagcacttttgatgtcccttttgttttttaattttttgtttttttttttttgagatgaagcctcgctctgccccccaggctgcagtgcagtggtatcatttcggttcactgcaacctctacctcccaagttcatgtgattctcatgcttcagcctcccgagcagctggaactacaggtgcacgccaccacgcccactttactttttagtgtttttactagagacggggtttcaccatgttggccagaatggtcttgaattcctgaccttagatgattggctcccaaagtgctgggattacagtcatgagccaccacgcccaggtttgatgtgccttttttttttttttttccatttttcttttttgagatggagtctcactctcgcccaggatggagtgcagtggcgcaatcttggctcattgcaacctccaccttccaccttcaagtgattctcctgcctcagcctcctaagtagctggaattacaggcacgtgccaacatgcccaggtaatttttgaatttttaggagacaggatttcaccatgttggtcaggctggtctcaaactcctgaccttgtgatctttgtgatccacccgcctcagcctcccaaagtgctgggattacaggcgtgagccactgcaccctgatgtcccttttaaaaagtactatgggatgggcatggtggctcacgcctgtaatcccagcatttgggagactgaggtgagcgatcacctgaggtcgggagttcgagagcagcctgaacaacatggagaaaccccatctctactaaaaacaaatttagctgaacgtggtggctcatgcctgtaatcccagctactagggagactgagacagtagaatcgtttgaactcgggaagtggaaattatggtgagccgagactgtgccattgcactccatcctagacgagagcaagattccacctcaaaaaaaaaaaaaaaaaaaaaaaaaaaaaaaagactctgtaggccaggtgcggtggctcctctctgtaatcccaactgtaatcccagtaatttgggaggtcaaagcagaaggatcctttgagcccagaattttgagaccagcctgggaaacatagtgaaaccccttttctacaaaaaaaaaaaaaaatacaaaagctagccaggcttgatggctcatgcctgtggtcccagctactcgggtggctaaggtaggaggatcgcttaagcctaggaggtcgaggctgcagttagaggagatcatgccactgcactccagcctggccgatacagccagaccctgtctcaaaatattaattaattaattaaatttatactattatatgataacagaaagtgatttttttctcccacttcactgccccacttcctattccatcctgggaaaagggaagagagtgtctaacaagtgaatgaagacacaaccctctggctgaatagggattccaactggaagctaacctctgatgccaagatttatagaatgtacatgtctcatagataggaattttaaaattctcaatctcatctgtataatttaaacaagttttaagttattaaactacatacatagaagtcagcatgtcacaacgaatcatatctaatgaactcacccactcatctgaacccaaagttccccgcccctttttttcttttgagacagggtcttgctctgttgaccaggctggagtgcagtggcatgatctcggctcactgcaggctggacctcctgggctcaagtgatcctcctgcctcagcctccagagtagctgggattacaggtgtgtaccatcacatccagttaattttttttttcttttggcagagatgggggtctcactatgttgcccaggctggcctcgaactcctggactcaagcaatccccttgcctcagtctcttaaagtgctgggattacaggcgtgagccactgcgcccagcccctctgtcttcattactgtgcttccctccctaattctgtacatatctctcattctccccttctctctctagctcttgttttcttttctttttccctgggattctgctcttcattttgtacccctctcctctcctgctgtttatccccttcttccctctattacttctcttccacctcttctgctccatcgtcgcaaattctttaacctcttgttgctccttctccccaatctttcgatcatcctcaatctccatatatttctgcctcttctcccatctctgcgcctcctctgctctccctgttaaattatctcttccctgttaaatccccctttccccaatctctagcaccccagatccccaggtgtcctccctgctgtgcttctccctctgttcttgccaccagcaccactctgctctgtctgccctggctccaaacccctcctcctctccctcactctgatgagcctccctctttgctgccccctccctaccttgctcttcttcatctctctgtacatcaagcttttctctacttttctccagttccttttctcctcctgtttttcttatcctttttttttttttttttttttccacttttgctgtctcttggcaaatccttcacccatcctctacgctaccatctgttatggcctttctcattcttcttttctctgtctcaggttttctactgctctctctctcagtctcccgatccctttggccaacacaatcacaggagggctttgaagtaagatgcctgcatcccggaggagcgcattttccagaggctggtgcagggcaggcaagaacacacggtgtcataggacagccccgggcacctccccaacgcgggctcaggagaaacggtgattacggagggaagacctggggagcataagggcccggcacgaggagggaggtggggggcgacggcgccttaagacaagactgggaggcgcccagggcgggaatccgcctcgcggtaaggactttaaaaagtgcgggttgggaggagtcagaaaaaagttttgagcaggaaaactacgcgatgggaagtgtatacgttaccctatagcagaaagattcgggacgggaccggtctatggtgactttaaacccaaaaggaagcgacccccagactctcacggggacttctcaatttgctctgggtaaagaaagacggaggagaacttccaggtctatgaggaccccacgtcccaggtacagaagcgcctgggacccgggaagcgcagacttaacacaacacagagcaaaactcacccccgcggtgggaccgtcactccacgcgacccgcttccgggtttgtgcgaatctgctctctggggacagaagccaggcctgggcgggacccgcggggaggtaggcggggcctgagcgaggtaggggcggggcgcgaggcggagagaccttgcccttcagaacagacagagggcggggcgggggcggggccggggcgggacctgtgcgtctctcagcctggctcccagagcctcaatttttcgggttttggaggcgagaccggccaggaaggctgaggcatgattcaaaagccctggaattgtctggaaggggatgcaaactagaatgtgaaatgcaaagccctgcctgggcggaacatacgatttcatgctgacggcccacagaacagaatagaaatcctctccctttctattttccattcactcaggagggacagtccaccctgtgctcagcttcagagacttccccagggcctccgcctgggatgcgggaccgagtgctcaggccagggaggagtgaggtcaccacctgctgcttaaacacagcaggaatgcgggcgcgggggcggaagtctgaggtcccagctgctcaggaagcagcggcgggaggatgctgagcctgggggtccaagccagcctgggcgacaaagtaacaccgcctcccgcagcgctcccttccttgtctctctctctttttttttttaacttttttttaaataaaatttttgattttgtgagatggggatccaacattgttatttttcatgtggatatccagttagttgtcccagcacatttgtggaagagatctattactttcatttttatatttacattttttcttttctttccttttttgagacagagtatttctctgttgaacaggctggagtgcagcggcgagatctccgccttactgcaaaattcacctcccggattaaggtagttctcttgcctcagcttcccaactagctgggattacagatgcgcgccaccaagcctggctaattgttttgtatttttagtagagactggggtttcatcacgttggccgggctggattcgaactcctgacctcaagtgatccacccgccttggtctcccaaagtgttgggactacaggagttagccaccgcgtctggccaggaaaactcttagaagttgcgtctgcagccgggcgccggtggctcacgcctgtaatcccagcactttaggaggctgaggcgggcggatcacgaggtcaggagtttgatgccagcctggccaatacggtgaaatcctgtctctactaaaaaatacaaaaattagccaggcgtggtggtgcgtgaatgtagtcccagctacttgggaggctgaggcaggagaatcgcttgaacccaggaggcggaggttgcagtaagctgagatcatgccactgcactccagcctgggttacatagtgagactacgtctcaaaaagaaaaaagaaaaaagaagttgcgtctgcataccacaggacacaggttgcatgaccacattcctttcaaggctcagaattatttaaaggtccatacctttaaattgtttaaattggaattatttgatatttcaaacgtttaatttcctactgagttacaggtaccgtctctcttgttgtttgcctttcaaagagagaccccaggtccttcagaaatacatccatgggttattaagctgaaaaaaagtttaggttgtttctaaaaaataccacttcaagccgggagcggtggctcatgcctgtaatcccagtgtcaaaccaccgaggcaggcagaacgcctgagatcaggagttcgagaccagcctgaccaacatggagaaaccccgtctcttgtgaaaatacaggattagccgggcatgctggtgcatgcctgtaatcccggctactctggtggctgaggcaggataatcgtttgaaactgggagacagagattgcggtgagctgagattgcatcattgcactccagcactggcaataagagcaaaactctgtctcaaaaaaaaaaaaaaaaaaaccctcagaagtgaagggggcctgcccctacacacctgtgggtatttctcgcaagatggagatgagagactgagaaaagaaataagacacggagacaaagtatagaggaagaaaagtgggcccagcggaccagtgctcagcatacggaggacccgcgccggcactggtctctgagttccctcagtatttattgatcactatctctaccatctcggagagggggatgtggaaggactatacggtaatggtggggaagggtcagcaggaaaacatgagagcaaaggactctgtcataaataagtttaaggaaaggtgctgtgcctggatgtgcacgtaggccagatttatatttgagtttacacaaacatgtcagtgcagtaaagagcagtattgccaccatgatgtctagcctccagccataagatggttttctcctatctcagtaaatataatgtacgatcgggttttactctgagacattccattcccagggacgagcaggagacagacgctttccttttatttcaactgcaaagaggcctttatctctcactaatcctcctcagcacacacggtttacaggtgtcgggctaggggatataaggtctttcctttcccacaaggccatatctcaggctgtctcagtggggggaaacctggacaatacccaggctttctcaggcaaaggtccctgcggccttccacagtgcattgtgtccctgggtaaccgagaatggagaatggcgatgacttttaccaagcatactgccagcaaacacatttttaacaaagcacatcctgcccagccctaaatccattaaaccttgagtcaacacagcacatgtttctggagcacagggttggggctagggttacagattaacagcatctcaaagcagaagaatttttcgtagtacagatcaaaatggtgtttcttatgtcttcctttttctacatagacatagtaagtctgatctctcttttccccacacagaagacagagaaaatgcatttacaaattttctaaataaatgtcccaagaaaagaggcaaaaaaaaatcttttttttttcaaaggaggaattatacctctatttccttgtttgtttgagacagggtctagctctgtcacccaggctggagcgtggtggagagattagaactcactgcagccgtgaaatccctggctcaagtgatcctttcacctcagcgccccgagcagctgggaccacaggcgcacaccaccacacctgactcgttttttgatttttagtacagacaatgtctcactacgttgccccggctgatctcgaactcctgggctcaagcaatcttcctgcctcagcctctcaaagtgctgggattacaggtgtgagccaccgctccgggccctgactttatttccatgaaatatgaaacccctatcctccacctcctgtgtgtaataggcagttttgcttgtcacttttcagtttccattatccactcaaacaacccaggaccttgcttagtttaataagccgttctgtcagttcccgctgcaaccagcgccccactccacccctttaccgaggtccctgcccctctcccccgccctgccccagactgaggggagctcgccccgcctgcaggacgcacgactctacctgctccaaaaaggcgctttgcattaaaaccattttcaatttaagaagagaaactattcagcgttcagcacacgtggtctactacaataagttgttttaccttcgattgtttgaaatgttaacttaaaacgggcaggaagcatccatgtgatattaggggtaacatcacggcacaagagaatgaatccaccaatcagaactcggaggatccagtcctagagggagaggatgacagcaggagacatccacggcccagctgagaaagcccgaacccgccccctccaggcctggccctttagaacaacccaccttccagagcccgccccctagacggcgtcaaccctctggcctggctcctgcccgcagtccggcccggcccccaggcagccttctcccttttgccccgccccaggccccgcccccacagcggcctccactctctcgccccgacccagcacctgttcaggccccgcccgctcagcaaccttttctctcctgccctgtccccgcttagtgtccagaaccctcccagacagggtccaggaccagcccatggttgttctgcacggagagcccggggctgacgcaggtgagtgattttttgtctttctgcttcaaacctgcctttctcagcaccccagcccccagtccagccataccaggaatttgggtgcgtcgggatgttgaaatccccacgcgagtttgtgcagttgtcagggagtcccagcttcgccatgggaagctcgcagacccggtggctctgcagcgtttgtatcgttttagcccatgtcctccccctttcaggtggcaaaatctcggctcaccacaatctctgactactaggttcaagcgattctcctgcctcaggctcctgagtaactggaattacaggcgcccgccactacacccagctaattttgtatttttagtagagactaaaaatgttggttacaccatgttggttatgctggtctggaaaacccaatctcaggtgatctgcccacctcggcctcccaacatgctgggattacaggcgtgagccactgcgcccagcctctaggtagctttttttagtctttgtagctatgttgtttaggaataaaatgggaggcaggtttttctgtcccaattcccagcttgacctttctctttggcttggtaatttttattatcctttcacaagctcagacagacataatgctttgacacaatgatattgctttatatagattttccacatcaataaagtccaagggtctgtcatgaactgggttagaagagacgagaagattcccaggagactcagtctcaagcaatcctcccacctcagcctcccaaggtgcgtggaccacaggtgtgatccactgaacacagtggagtctccagctcaaaaaaacaaaacaaaggttaaggtactctatcgaattacgtcatttgacttattttatttttattttttatttatttattttttttctgagatggagtcttgctctgtcaacccaggctggagtgcagtggcgcgatctcagctcactgcaacttccgcctgccgggttcatgccattctcctgcctcagcctcccgagtagctgggactacaggcgcccgccaccacgcccggctaattttttgtatttttagtagagacggggtttcaccatgttagccaggatggtctcgatctcctgaccttgtgatccacctgccttggactcccaaagtgctaggattacaggcgtgagccaccacgcccaattgacgttttttttttttaaataaaatgtttcacatatttattaccgaacctagccaaccaatgtgttcgtaacagagtcagagataaaaaatatattcccaataaaacatgtccaactctccagataggggtgacattttcagcttgatatggttgcgtgattgtgaccttattatcagttttcatgcgaatccactggggaatggaacaattctgcttttgtttcttggccaggactctcttaatcctgaaagtcttgtgagaagacatggcaagaagccaagtcaagcacacactacgatgacggagagaggagaagggtcttgattttttcttttttttagactaagtttctttctttttgcccaggctgcagtgcaatggtgcgatcttggctcgctgcaacctccgcctcccgggttcaagtgattctcttgcctcagcctggcgagtagctaggtttggccaaaatatgaactagaaaggcaggaacctggccaaaggtggggagcttgaatgttattaccttattcctgcttgacctttactgccaacgccaacacaaatggtcagaggtcccttatatgaaaatcttcatgatcttgtgggaaaaccctgatttttgtaaaggctgcaaaacaggctcaaaaataaataaataaataaaattacatttaaaagagccagttgcagtggctcacgcctgtaatcccaccactttgggaggccgaggtgggtggatcagctgaggttaggatttcaagaccagactgaccaacatggagaaacaccctctctactaaaaatacaaaaattagccaggcttggtggcgggcacctgtaatcccagctacttaggaggctgaggcagaagaattgcttgagcccaggaggcaaaggttgcaatgagcccagaccataccactgcactccagcctgggtgacaagagcaagactccatctcaaaacaaaaaaataaaataaaataaaaaataaataaaaatacaaaaattagcatggtgtggtggcatgcatcactaatcccagctactcaggaggctgaggcaggagaattgcttgaatgcaggaggtgaaggttccagtgagctgagatcatgtcattgcactatagcctgagtgacaagagcaagactccatctcaaaaaataaaaataaaaaacaggctgggtaaagtggctcaagtctgttggccaggctggtctcaaactgctgacctcaagtgatctacctgccttggcctcccaaagtactgggaaaacaggcatgagccactgcacctgacccattcttcttaacattaacactttttatgtcaattaatgcgtgaactcaatgttaagtcaactcaaactcaagtcaatgttgaatcaactctaatgtcaattaaagttttatgattttttatattcattttatttggaacaattatctcaaaaatgaattttctgatgttctgcatggaatgaccacagagtgaagaccttgccacccttacatttgtaaggcatctgtccagtatgaattctctgatgtctaatgaggtgtgaacatgaagtaaaggctttgccacaatcatcacacttgtgaggtttctctcctgtatgaattctatgttttgcataggatgaagcttgactgaagaccttgtcacagtcatgatatttgtaaggtttctctccagtatgagttcactgatgaactacaagttatgaatgacgtctgaaaaatttgccacatttattacacttgtagatctctcttcaatatggattctgtaatgatttgcaatggttgtagcattactgaagactttgtgacaatcattacatttgtaaagtttccctacacccatggattgcttgatggtgaataagtgttgactgtccagtaaaggctttgccacactcattacacttgtaaggtttctctgcagtatgaactctctgatgttttgcaaggcttgctttttgattaaaaaccttgccacattcattacacttgtaaggtttctctccagtatgaactctctgatgttgtgcaaggattcctttttgattaaaaaccttcgcacatttattacacttgtaaggtttctctccagtatgaactctcgtatggtttgcaaggcatgaatcactccggaaagccttgtcacaaaccttacatttgtatggtttttccccagtatgaattctcctatgtctttcaaggtgtgatctgcgactgaaaactttgtcacattcttcacatttgtaaggtttctctccagcatgaagtctatgatgacgtgcaaggttttctcttcgactaaaaaccttgccacattcattacatgtgtaaggtttctctccagtgtgaagtgtatgatggtattgaagggatgacttccgactgaaactcctgccacatttattacacttgtatggtttctctccagtatgaactctctgatgttctgcaaggtatgaatcactccggaaaaccttgtcacaaaccttacatttgtatgatccctctccagtatgaatcttcctatgtctttcaaggtgtgatctgcgaatgtaaacattgtcacattcttcacatttgtaaggtttctctccagtgtgaagtatatgatggcattgaagggatgatttctgactgaaggtcttgccacactcattacacttgtaaggtttctctccagtatgaattgccttatgaattacaagggctgaatttcgaccaaaagtcttgccacactcattacacttgtaaggtttctctccagtatgaagtctacgatggcatctaagggatgacttctcactgaaggtcttgccacactcattacacttgtaaggtttctctccagtatgaagtctacgatggcatacaagggatgacatctgagtgaaggtcttcccacactcattacacttgtaagttttctcaccagtgtgacatctatgatgatatacaatgtattgcttctgattaaagatcttgccacatacatcacatttatattctctctctcttgaatgggttatgtggtgtctccttaagagtgagctataattaaaggctttgccacactcattactttggcaaggtttttctctcatgcatatttcctgtatttgtgtgaatgaagaatggaggaaattcttcccatacttattagaaatatgagttttgagcctacaagaaattctttgggattctgaagctgaggaagcaccgatagacttgtccaattggttactaattttccctttagtctgaaacatgtggagttcaggcagatgcgaatgaaagcttaatccaagctgatctttaataggcttgtttccagcatgcctgtgatcacttcggtctgtactaccagtcaactttttgatttttgtcatgggtgcttcatggccatttctttcaacttcttgccactgaaactcaaagtgatgaatatctttcttcatttctgggaagcaaaaatctccaatgtgatgacttttatgtctttgcaacgtccctgtgtggatcacttctcctgtaatactgtgcctggttgatgagaactccatcatggattttaaagagctatctaaaaaatataaagaccaataggtttccaattaagtacagatggtaaataatagttgatattcagatgtgtaaaaattacacaaaaagcaatacttattttaaacttcccaaatgtgatcttcatagtttaagaacacactgtctctactgaacatacaaaaattagccagtcatggtggtgggtgcctgtaatcccagctactcaggaggctgaggcagcagaattgcttgaagccaggaggcagaggttgcagcatgcggagatcaccacattgcactccagcctgggcaacaagagcaaaattctgtgtagaaaaaaaaaagagttcagtcaagagcctcatatatatgaggcagtgagcctgaatgatgtcctccctaagaggaatttctacagcagtgactactgcttagagaagatgaccattcgtttatgtgatgaacactgtcacagtgctagtgagagatgcttctgtgatggttctcaaaaaccagaatgaaaggccaagcatggtggctcacgcctgtaatcccaacacttcgaggctgaggtgggcaaattgcttgaggccaggagttcaagaccaacttggccaacatggtgataccctatgtctaataaaaatatgaaaatctgccaggtatggaggcatgtgcctgtaattccagttaggttgagaggctgaagtacaagaattgcttgaactcaggatgcagaggttgcaataagatgagatcaagactctgcactccagtctgttcaacagagggagactctgtctgaaaacaaacaaacaaaaagaaaacaaaaccacaagcacagctggaaacacttgtcaatcagtgtcatgctttctatctcgtatcctgggccatgctgaccattctgctcagggcttccagggacatctcttcctagagcaggatgatgttcaattgtattagtcaaagtgttcgtgaattttctgtttttatgtaaaaccactccaaagaagagtctctaagaagctgtccatgacagataggagggtcatcaccgcagaaaacaatgacatgtacatcaaaagcatgtatggggcaaaatcacaaaagagaatataaaaccagaaagagccaagatagacaagtgcagattcctcatgtctggagggacattttcctcacccacaaactccaggttcctgtagttctccaacatcacagccctgtataaagccctctgtgcagggttcaggcatttccactcctccaaagagaactctatagccacatccctgaaagtcaagcgtccctaaaataaaaaacacgtttcaacaaaacattatggaggagtgagttattgccctcacgtgaaatgagaaaacagaaaataagtattgatttgatccaagactgtgttctgacaaatttatgttaaggtatttttgaacaatttttcagtatagttgcattttattgtactttttcatgatagcttttaaaatcccctaagtcactgtggaagtctcagttttatggacaatataaggccaggaatggtggctcatgcctaaaatcccagcactttgtgagaccaaggcaggtggatctcctgagctcaggagttcgagcccaggacaatatggtgtaaccccgtctctactaaaaatacaaaaaaaaaaccaggtgtggtggcacacgcctctagtcccagctacctgggaggctgatgcacgagaataacttgagaacaagagacgaatgttgcagtgagccaagatcgtgccattgcactccagcttgggctgcagagtaggactccatctcaaaaaaaaaaagaaaaaaaatatatatatacacacatacacatatgttttatatatataatatatacttatatatattatatataaatatataatatatattttaatatttaattatatataatatatatttataatatataatatataatacaatattatatataatatgtatttataaaatataatatataatacaatattatatataatatgtatttataaaatatatatgatacaatattatatataatatatattacaatattgtatcatatattatatataatattgtataataaatatattattaaataaagatattaaatatatataatatatattttatatatatatataaaataagtccagacatggtggctcacacctgtaatcccatcactttgggagaccaaggtgggtggatcacttaaggtcaggagttagagaccaacctctccaacatggcaaaactccgtatctactaaaaataaaaaaattggctgagcatggtagggaggtgcctgtaatcccaactattcaggaagctgaaacaggaaaatcgcctgaactctggaagcaggggttgcagtaagccaaggtcacaccattgcaatcctgcctgagcaacagactgagactctttctcaaaaaaaaaaaaaaaaaggtatatatatattgcaaataatgtattttctacataaaccgtgggattggctgcacacagtaggtacacctgtaatcccagcactttgggaggctcaggcaggtggataacctaaagtcaggagtttgacaccagcctgaagaacatggacaaattctgtctctactaaaaatacaaagttagctgggaatggtggcgcatgcctatattcccagctactgaacctgggaggtggaagttgcagtgagccgatatcgtgccactgcactccagcctgggccacaagaatgaaactccgtctcaaaaaaaacaaacaaacaacaacaacaaaaaagaaatgaaacaaaactgtcaaggactcatgagtcttcattcagagaaagctccaaggaggatttaaaagagtgagctatcttgttttctaccttggaaacatgaaaattttcagaacttgcaggataaaatatcataacaaacattcatcagaccgggagcagggctcacacctgaaatcccagcacttagggaggccgacgtggaaggatcacttgaggccaaaagttcgagaccagcctggccaacatggtgaaaccccatctgtactaataacacaacaattagccaggagtgtagcacgcatctgtaaatgcagctactcagttggctgaagcgtaagactcatttgaacctgagagccagaggttgcaatgtgccactacactccaggcggggaggccctgtctcaaaaaacatgcaaaaaaaaaaaaaaaaaaccccattcatcaaataattttttctaaaatctcataacggtatatgaatacatttctaaaggattgcgccgacttgccacagaactctcaacagcgattccccactgagacatgggaatgggtggaaggctggacaggaaaggggatgcataagtgcacttttctttggacttttactacacaacacatatatacatcatgtgatgtttaaaataaaagaattacttaataataatgggtagaaaaagaatggctccatcctctctaacgacgtaagttgtgctcttatgtcagagcaaacttataatcatttttacctaaaatgtttgcttcatcagagtccctgtaaaaaaaacaaaacaaaacaaaaaacaaaaaaaaagtctctgtggggtcaaagtgctgagaatgatttaaagaatcccctgcagttagatatttatattgatttcataatttgaagtcaatgatggaataaagctaactctattactggtatctatatccgctttccattctattctaagacattgaaagtgcagagtcctgctgggctgtctcacacctgtaatcccagcaatttgggaagctcaggtgggagggccacttaagcccaggagttcgaggctgctgtaaactagaattgtgccattgcactccagactgggccccagagtgacaccgtgtctcttaaaacaaaagtttggcgtcagagacatattgactcactagtgtagcttcaaatgcattacaaaatcagacacaaaatatctcccctagtttgtctcctcttccagaatttaccagattaaccagtgaacattaatgtatgactttcatatacagtttctctgatctggtccacaaagagctaaacatgcatccagatgtggcccctgaacaatccctgctgcccaacatcactgacaccatggggcccacaccccatctccatccatgtctggtgtgagcccttcccaggaccatgcccagtggagcctcttcccaagctcatgtcactaggttataggagatggaatttaagtgaagatgagagggactgagaaaagacacgggtgagtgcgagcaaacgtgtgatgtagaatgcttcacactcagagaagattggctactacaatacctggcacttcagaaaggaaagagacagaagaatccaccaaggaatatcacttacctgaggaagagccatccctggctccttttctttgctcttcttggtggcttcctcacgtaacatgagtctttggaaatcctgtatgttaaaaaagcaagagatttaatatttagaaaccattgactcctttcctgtgacaaaacacacacacaggggaaacctcacccgagagaaagatggtcctttgctacccactgcaccagagaccatgcagagataagaaagttccacaggaagacctacaaatgtaattttgacccgttttcagatcttgctcccctcctggaaaagtccacacacacgctgcagcaggacacagatcttcagggcacagatctagccctaaccaaactccatgcagagcacagccccctcacctccctgtggatcacagactgatctcagctctcaacatggaggaaacttccttgatgtttaatgctggacacagataagaatcaccagtgccattgtaagtattattgagtgtgggtcccatcctattataatagcaatctgataaaacagcatgcctgtaatcccagcattttgggaggccgatgcagctggatcccttcagctctggggttggacaccagcctgagcaacatggcgaaagcccatctctacgaagaacacaaaaattagtgtggtgtggtggcacgcagctgtggtcccagctactctggaggctgaggtaggaagcagaccaccacttctcctgctgccttcctccctcccccttgcctagtttataagacaggaggaaaggaagaaagcaaaaagttagaaagaaacagaagtaagataaatagccagacgaccttggtgctaccacctggccccggtggttaaaaataataataataccaacccctgacctaaactacttatgttatctgtaaattctagacattgtatgaagaagcattgcaaaagtttctgttctgttagctgatgcacgtagtgtcaagtcacattccccacacttgcttgatctatcatgaccctttcacgtggatgccttagagctgtaagcccttaaaagggccaggaatttctttttcagggagctcagttcttgagacacgagtcctctgatgcgctgggccgaataaagccacttccttctttaatccgttgtctgagaggtactgtctgcggctcgtcatgctacatttcttggttccctgacttggaagcgaggtaattaacagaaggtcgaggcaaccccttaggtgacttaggcctgccctttggagcatccctgctgggtactccagccagcttgggcgacatggattctgagagtgctaccaggtaggcatgtgccccagaaagatacttagcctggccatccgaacttgcagtgtaaccagtgtgcttactgtaaagaaataggatattagaaggacaagtgccctcagctaaaaggaaaacaaggtggctcagagcaggaggccccagaaggagccctgttcaatatagcagaagagttactgaactgaggaggaccaggctcaactgcccccaaggagcccatggtcaagatgacagttaggggcaaagacattgattttcgtattgataccagtgctgaacattcagtagtaaccgccccggttgcccccctttccaaaaagactattgttataatcggagccatgggagttttatcaaagcaagctttctgttgccccagacttgtactgtaggaagacataaagtgattcaccagttcttgtacatgcctgacttgaaaggacttgaaaggacttgcttagcgagctgagagccaccgtctcttctacagagcacagctctttacagctaaggttacccagaacgggagtcattatggcccttacagtcccccaggaagaggaatggagacttcttttaactgagccaggccaagagataagaccaactctggctaagcggtggccaagggtgtagacagaagacaaccctccagggatggcagttaaccaagccctggtacttatagaagttaagcgtagggcccagccagtcaggcaaaaacagtacctggtccccagagaagatcttgaaagtatccaggtccatctcaagagcctgagagcctttagaattacagtcccttgtcagtctccctggaacactcccctcctgcctgttcccacgccagggaccaatgactacaggccggtacaggacttgcacttagtcaatcaagctacagtgactttacatccaacagtacctaacccgtacacgttaaggttgctgccagctgaggacagctggttctctggcttagacctgaaagacactttctttagcattagactagcccctcagagccagaagctgtttgcctttcagtaggaagatctgggatcaggtgtcactgctcagtactcttggacccggcttctgcaagggttcaagaactcccccaccatcttcagggaagcactggctcgggacctccagaagtttcccaccagagacctaggctgcgcattgctccagtacgttgatgaccttctgttaggacaccccatggcagttgagtgtgccaagggaaaggatgccctactctggcccttggaggactataggtataagttgtccaagaagaaagcccagatctgctgacagcaggtacattacctaggatttactatccaacagggggagcgcagcctgggatcagaaggaaagcaggctttttgcaacctactgaagcctaagaccagaaagcaggtgaaagaattcttaggtgctgtgaggttctgcagaccgtggatcccaaactttgtagtactggccaagcctctgtacggagtcacaaaggggcaggaccaggaaccttttgaacggagatcccaacaacagcaagcctttcatgagttaaaagaaaatcttatgtcagccccagccctggggttacctgacctgacaaagccttttacgctgtatgtttctgagagagaaaatacggcagttagggttttgatccaaactgtggggccctggccgaggccagtggcctgcctctctaagaaactaaatggggattctaaaggttagccctcatgtttgagggccttggcagcaactgccctgctggcagaagaagcagataaactaactcttaggcaaaacctgaacataaaggccccccatgctgtggtgactttaatgaataccaaaagacatcattggctaatgaatgctagactaaacaagtaccaaagcttgctctgtgaaaatccccacataaccattgaagtttgtaacaccctgaaccccgccaccttactcttggtatcagacagccctgttgagcataactgtgtagaggtgttggactcagtttactttagcaggcttgacctttgagaccagccttgggcatcagtagactgggagctataagtggacaggagcagcttcaacagcccacaaggagagagatgtgcaggatatgcggtagtaaccctggacactgccattgatgccagatcgttgtcccagggcacttcagcccagaaagccgagctcattgctttaattcaggccttagaactcagtgaaggtaagactgaaaatatttacactgactctcggtatgcctttttaacccttcaagtgcataaagcattatataaagaaaagggcctgttgaactctggagaaaaagacataaaatatcagcaagaaatcttgcaattattagaagcagcatagaaaccccacaatgtggcagtcatgcactgcagaggacaccagcgagcttccacctcggttgccttagggaactccagagctgactcagaagctcgaaaagcaacatccacaccctactgggcatcagtcacagcccccttgctccctcaagcacctgaccttgtacctacttattctaaagaagaaaaagactttctccaggcagagggaagacaggtgatggaagaaggaaggatccggtcaccaaataggacagtacctgtgccacagctgctaggagccacagttgtactggaggtgcatgaaaccacccatctaggtcaggagtcacttgaacagttgttaggctggtacttctacagctcacaattgtcagccctcgccaaaaccgtggcacagcggtgtgttacctgccgacagcacaatgcgaggcagggttcagccattctgcccggcatacaagcttatgaagcagccccctttgaagatctccaggtggacttcacagaaatgccaaagtgtagaagtaacaagtatttactagttctcgtgtgtacctactctaggtaggtggaggcttatcccacacgaactgagaaagctcatgtgcttcttcgagatcttattcctagatttggacggcccttacgaatcagctcggataacgggctggagtttgtggctgacttagtacagacgacagcaaaggtattaaagatcacgtggaaactgcatgctgccttctgacctcagagttctggaaaggtggagtgaatgaatcggattatcaaaaatagcttaaggccttaggaaaaattacacaaatgatttcagcccaggtaaatgagagatgccccattagcttattctccccagttcactctttctccccgggtgattgagtgtggatcaaggactggaacgtagcccctgtgtgcccccactggaaagtaccccagaccgtcatcctgaccactcccaccgctgtgaaggtagaaggaatcccggcctggatccaccacagccatataaaacctgcagcgcctgaaacctgggaggcaaggccaagcccagataacccctgcaaagtgaccctgaagaagacgacaagccctgctccagtcacacccggaagctgactggtcctacgcacagtggaagcatgaggaagctcatcgtgggactcattcttcttaaattttagacttgtacagtaaaggcttcaactgaccttcctcaaactaaggactgttcccagtgtattcatcaggtcactgagataggacagcaaattaaaacaatctttctgttctatagttattatgaatgtacaggcacgttaaaaggatcttatttgtataattccactcaatacaaggtacgtagcccaggaaatgacaaacctactatgggttataacccatctaagcctcctgcaaccaccgtttttcaaataagattaagaactggtcctttcctaggtgacacaagtaaaataataactagaacagaagaaaaaagaatccccaaacaagaaactttaaatttgatgcttgtgcagccattaatagtaacaagctcagattaagatgtggctctcttaactaagaaaggagctgcacagtagaaaataaatgtttgtcatgaggcagaggtctgtgaaaatttgcctgttgcccatgtgttatttaggctacttagaaaaatgacaaaaaagacccggttcactttcaaaaaaaagaagccaacccctcctgtgctagcagtcactgtaacccactagaactaataatcactaattccctagacccccgttagagaaaaagagaaggtgtaatcctgacggtcaataggacaagggtaaccccccaagttgccattttagtccgaggggaggtccccaggccctttcccaaaccagtgtttcaagccttttataatgagctaaatctgccagcaccagagcttccaaaaaagacaaggaacttgtttctccagttaacggaaaatgtagctcattccctcaatgttgcttcttgttatgtacgcggaggaactactgttggagaccgatggcctcaggaagcccgagagttggtgcccactgatccagttcctcacacaattccagctcagaaggcccaaactagcaacttctaggtcctaaaaacctcagttattagacaatactatgtagctaaggaaagaaaaaacttcagcaaccccgtaagaaagctcaattgtctaggacagaagttgtatacaacagcacaacaaggacagtcacttggtgaggcttaaaccacactgaaaagaactcattacgtaaattttctaaattacagactgcctaggctcatccagaatttcattgagactggacggcccccgctggactatactagtccaggcacagagactatactatactatactagtccaggcacaggctatactagtctgtaggcacagagacccatctccaacaacaaagaagaaaagtgaaaatctgggtcctggctctgggaatctaaggccaattaatgtgaactttgcaaaactagaccaaaaggaataaccccatctccccacccgtagtaacaaaggatcaaagggtactctccctgtagccctcccacttccaccacgtctcagatggaaagggaaagagcccaggagtggccacaaagcaccggccaccctggggctgcggggctgcaacgctgcgctccaggggccgactagagcgaggctgggaagcgctcttgcccagggcaagaatccagctccgggtgaggacttgaaacagcgcgaggcgggaggacgcgtcagaaagggttttgctaaggaaagtttcgcgacaggaggtgtctgcacggccccactgcagaaagaccggggacgggaccagcctcagggcaactttaaactcaaaaggaagcgactcacggactctcacccggacgtttcaatttgctctgggttgagaaaagaggggccggaacctgcaggtctgtggggaccccacgtcccctatatagcagcaccagacaactaggaaacgcacacgccgccgtgcaactttcagtccacgccatccgcttccgggtctgtgccaatcggcgcaggacagaagcgggacctgggccagatccccgagaggtgggcggggcctgggcgaggccggggcggggtgcaaaggacaaggggcccggcgcggaagagaagagtcttgggctgggaggagtccgcgggggcgggaaaggggcggggcctgagcttttctccatctcgctctccgcgcctctgttttcaaggttttagaggtgaaacccgccagtgaggctggagcagctcagcagtcagggaaatagtacctccctgagaagtcgccgtgtggcggtaattggatccgggaaagttccttgctattgaaatttattttagcaatttaattccaaagcctggaagttgtctacggcaggaatgcaaactagaatgcgaaatgcaaagccttgcctgagcgaaaggtacaatttcatgctgacggtccacagaacagaatagaaatcctctccctttcaattctccattcactggagtgggagagtccacactgtgctcagctcctgagacttccctagggccaccgtctggggtgcggagcagaggagtgtgcttaaacacagcagggatgcgggcggggtggcaggagtctggggtccccgctactcaggaagcaggggcgagaggatcgctgagcctggagttccaggccagcctgggcgacaaagtaagaccctctatcccagagctccctcctccgtctcaataaacaaaaaagtgatttaaaaaaagcactgacattgtaacagtgcatataagttgcccagttgtttcttacgtttattatttcatgctgcacttaaaatgagttatttttgtcgtggaaaagaatcaaactgtaaaatatcttaagagatttattctaagctaaatatgaatgaccctcaggaggtcctgagaacatgtgtccaaggtgatggggaacagcttgttcttagacattttagggaggcattagacatcaatcaaatacatttaagaaatacgctgctttggttcagaaaggaggggcaactcaaagcggggacttctgggctacaggtaaattgaaacattttctgattgacaattggttgagtttgtctaaatacctgggatcaacggagaggaaatgttcacgttaaggtaaaagattgtggagaccaatgttgttttcaagtcttctattggctgcccttagagataatagatgataagtgttttctattcagacctttaaacagtgcgagattcttacttaatctcttcaggattggtagggcctagaagaaaaagatctagctatgttaacagagattctttacaaatgcacatgtacccctcacaaagaacagctttgcaggaccatttcaaaatatggcacagaaacatgttttggggtaaaatattttgactttcttctttgtcacgttattccagagtcagactggaaagtaagacaggatatataggactaaataaaacccatctgatgagtatttatggtttgtagggcatgactccccagaccctttagataggaatttgggcaagagaaaaaaattagaccttggtcctcattctcaaattctttttttaaaaaataattcctaagtgtattgtaatatcaaattcactttacgtgccttctgaaaataagtagaaaatgtactttttatcttcaagttgtaatttttttttccctagaaacaggacctagttctgacacccaggatggaatgcagtggtgggaacactgcccactgcaacctcaacctctggggctcaagcaatcctcccgtctcacctcccaactagctggggccacaggccctcaccaccaggcctggctaattttttaatattttgtagagtcgggggtccactatgatgcttaggctggccttgaactcctgtactcaaacaatcctcccaccttagcttcccaaagtgttgggattaaaggcgagctaccacacccatccaattgtaatctattttgggtgttttctttgttgttctctcctaagtgttctatcaggtgtgaacaacaaaggctgtaaaataggcagtcttcaaacattgggatttattttcatatagagaataattatgagatattactaaggatacattgcagtcaggttattctgttttacgtgggccctgaagaaaatataactaaattacaaaattggctgggtgtgatggctcacacctgtaatcccagcactttggcaggcctaggcgaatggatcaccctgaggtcaggagtttgagatcagcctggccaacacagcgaaaccccatctgtactaaaaatacaaaaattagctgggcatggtggcatgcgcctgtaatctcagctactcaagaggttgaggcaggagaattgcttgagcccaggcagcagaggttgcagtgagctgacatctcaccattgcactccagcctgggcaacagagtgagactgcatctcaaaaaaagaaaaaaaaaattataaacttttacatcaccgcatttctgcatgcaataattttatggcaatatctgtaagttaacatgtactatgaactatatttttcactcacatccctagttatcgaaggtttcatttatcaaatactagtaattagctaaaacataattatgtttaggaagaaattagcatatctaaaatattagcaagtttaaaaaagcataatgtggccagggatggtggctcgtgcatgtaattccagcatgatgggagaccgaagcagaaagatagctagtggccaaaagttggagaccagcccaggcacatggtgaaacctcatctttatattttaaatatttatgtatctatgtattcatttattcatctttgagatggagtttcattctcattgcttaggctggagtgaaatggtgtggtctcggctcactacaacctctgtctcctgggttcacgtgactctcctgcctcagcctcccgagtagcaggtattacaggcatatgccaccatgcctgactaattttctatttttactagagacggggtacctccatgttagtcaggctggtctcgaactcccgacctcaggcgatccacccaccgcagcctcccaaagtgctgggattagaggcctgagccaccatacccagcctctatgtagctttgtaaaaaatccttgtagctgtctcttttaggaataaaatgggaggcaggtttgtctgacacagttcccagcctgacttttctctttggcttagtaatttttaagcttctttcacaaccttctgacagacataatgctttgacacactgatattggtttatatagattttccaaaacagtaaagtccaagggtctatcctgaactgggttagcggaggcgagaagattcccagaagactcctgatctcaagcaatcctcccacctcagcctccgaatgtgtgaggaccacaagtgtgatccactgaacccagtggagtctccatctcaaaaaaaaccaaaaagcaatacgggaattaaggtactctatggaattacatcatttgacttttttttgaaatgaaaagcctcacatatttattactgaacccagccaaccaacatgttcataacagattcagagagaaaaaatatattcccaataaaacatgtccaactctccagataatggtgacattttctgcttgatatggtaacgtgattgtaatgctcagacagcataaaaatgtgtgccatctcatgtacaattccttatagacacggattggttcttctccaatgtctccttttaaagttgtacctgattttattaccagttttcatctgaatccactggggaatggaacaattttgctttttttcttggccaggaattgcttaatcctgatagtcttatgagaagatctggtgagaagcagagtcaagtacacaccatgatggtggagaaaggaagagaaggggcttgacatctttttttttttttttttttttttttttttgagagaaagtttcactcttgttgcccaggctggagtgcaatggcactatcggttcactgcaacttccacctcctgggttcaagcgattctcccacctcagcctcccaaggagctgggattacaggtgtctgcgaccatacctagctaatttttgtatttttaatagagatggcatttcaccatgttaaccagcctgttctcaacctcctgactattgtttctgctgttagctgtcagtcctcttcatcacggcacaaacaagattattgtttttctctgaaactgatgtggatggtctgcctgctgctccacgtgtaaccttcaacattgtcttctcccaactcaaaattagttatccatttacaaactgttgatttcttttgggcatcgtccccataaccttttcataaagcatcaatgatatcataattcatctacccaaactttaccataagtattctttttttgagacatgctggagtgcagtggcaagatcacagctcactgcagcctcgacctcccaggctcatgccatcctcatgctacagactccacagtagctggccctgcagtcaggtgccaccctgcccagtgaatttctgtattttttgtatagaaggggttttcaccatgttgcccaggctggtcctgaatgcctgggctcacgtgacccacctgtcttggcctctgaaattactggaattacagacctgagacactgcaactgttctcatcataaattttatgtttcttcttgtttcaattttagcagaatttgtattcctttgatacagtctcttttcaaactcatgtcttatccttctcagtgcctcaaactagagcctgttcagacatgttataacagatttgtatcagtttattttggtgcaaaaactgtgaaattcatgcacaatttttccataatatgtatttttccatgagcttcttgaagaccacttgtactagaaaactgtattcaagaggatatataaaaggattgtagatatgcaagtgccatttacttctggcatgcaaggatggttcaacatattcaagcaaatcaatgtgatataccacttgaacagaatgaaagatgaaaaccacatcatctcaacagatggagaaaaatcatttcacaaaattcagcatctgatcatcatagaaatcttaaacaaaatagatggagaaggaaatttacctcaccaatagaaagaccattgatgaaatgaccaatgtggagataaccaagcagggaaaatagaatccttttcccgtaggatctcacatgatgcaagaacgttctcactttttctattcaataaatactggaagtcctagccagagcaatgaactagcaaaagaaatgaaatgcctcaaaatcagaaaaagtaaaattatattttttgtagatgacatgatcttctgtgtagaaaatcacaaagagtcaaccaaaatactactgtgactaataaacacatcagtagatttgcacaatacaatatcagcaccaaaaattcgttgaattttcatacattaacaataaacaattttaaatgaaaatttaaaaacacttccatttgctagagaacttaaagtaagaaataggaataaatggaaagaagtgagaaattcatacattgaaatctacaaacattgatcaaaatgattaaaaacatatataaagatataacccatattgatgttttggaaaaattaatactgttaaatgattacataacccaatgtgattttgattcaacacaatacccataaaaatctctatcagtttttgttgaagaaacaaaaaacagactgggaaaggtgctcacctctgttggccaggctgctctcaaactcctgatctcaagtgatctacctgtcttggcctcccaaagtgctgggattacaggtgtgagccaccgcacctggcctaatcctcttaacataaacactttaatctcaacaaatacttgaactcaatgttaagtcaactcaaactgaactcaatgctgatttgaatctaacatcaattgtgcttgatggtttgctatactcattgcatttgaaattattacctcaaaaatgaatttcctgatgtcctgcaaggagtgacctcagactaaagatcttgccacacatatgacttttgtaagatctctgtctagtatggattctctgatgtgtaatgaggcatgaacctgaaataaaggctttgacacaatcatcacccttgtgaggtttctttcttgtatgaattcacctgtgttttgcataagatgaagcttgactgaagaccttgccacaatcatcacatttgtaaggtttctctccagtatgagttcgctgataaactgcaaggtatgaacgaagtctgaaaaatttgccacatttataacacttgtaagttctcacttcattatgcattctccaataatttgcaatggttgtagcattactgaggactttgtgacaatcattacattagtaaagtttccctatgacatggattgcttgatggtgaataagtgttgactgaccactgaaggctctgtcacactcatcacacttgcacggtttctctccagtgtgaattctagtatgttgtgccaggtgtgaatcacacccgaatgccttgtcacaaaccttacatttctatggtttctctccagtatgaactctcctatgtatttcaaggcgtgaattgaaattgaaaactttgtcacattcttcacatttgtaaggtttttctccgatatgaactctatgatgatgttcaaggtttgattttcaattaaaaaccttgccacattcattacacttgtaaggtttctctccagtatgaagtctatgatgacatgcaaggtttgatttgtgattaaaaaccttgccacattcattacacttgtaacatttctctccagtatgaatgaccttatgcattacaagagatgaattttgaacaaaggtcttgccacactcattacacttgtaaggtttctctccagtgtgaattacaatatgttgtgccaggtgtgaatcacgtctgaaagccttgtcacaaaccttacatttgtacggtttctctccagtatgaattctcctatgtctttcaaggtgtgattagcgactaaaaactttgtcacattcttcacatttgtaaggtttctctccagtatgaagtctatgatgacttgcaagatatgctttttgattaaaaaccttgccacattcattacacttgtgaggtttctctccagtatgaattgccttgtgaattacaagggatgacttgtaactgaaggtcttgccacactgattacacttgtaaggtttctcaccagtgtgacatctatgatggtatgcaaggtatcgcttctgattaaagaccttgccacatatatcacatttatattttttctctcctaaatggattatctgacatttttttaacagtgagctacaattaaaggctttgccactctcattacattggaaagatttttctctcatgtgtgcttcctggaggaaattattcccatacttattagaaatatgggttttaggaatacaagaaattctttgggatgctgaaactgaggaagcatcattgacagacttctcatcttgactatcaattttccctttgctctgcaatatatgcagttcaggcagatgtgaatgaaagcttgatccaagctgatctttaataggtttgtttccagcatgcctttgatcatatcagtctgtattacctgtcaacttttttatctctgtcatgagtgcttcatggccatttctttcatcttcttgccactgaaactcaaagtcctgaaaatctttctcaatttcctggaaggaaaaatctccagtgtgatgacttgcttgtctttgcaatgtccctgtgtggaacacttctgtattgccttgccttcttgatgagaacttccttgtcatgcatttggaagagatagctacaaaatataaacaacaataggtttccaattaagtgcagatggtaaataatactgaaatatgtaactaggacacaaaaaacaatatttattttgaaattcccaaacatgattttcaaagtttaagaacacaaaaggagtaaggttctttaataaataaagggcgattacaagtcctttaaatcatttctacagaagcctattcccaatatcatgacgaaacactgacagggcacaaacatgtgtaagcctaaagtaaggagtgtttttccactgtgaccctaaaatgtatcacagtttgcaaaaagcatattactgtcacatcaaagaaggaaaaaatatatattcttcatatttatagcatagagtatacaaataaatgctaaaggaccggataacgtactatattggtaaataatccacaacaagctcttgtaaggataatcaaaatcaatggaaattctgtattgtcaaacaatcacagcactgagaagataagaaaagaatacaaaaattagccaggcatggcggcccatgcctgtaatcccactacatgagaggctgagacacaagaatcaccaagaggcaaaggctgcagtgagtcaatatcgcaccactgcactccagcctggatgacaaagtgagactccatctcaaaaaaaaaaaaaaaagcagggcatggtggctcacacctgtaactccagtacttgtttgggaggcagaggcaggtggattacctcaatacaaaaagtagccggtagccaggcatggtggtgggcacctgtaatcccagatacctgagaggctgaggcagaagaattgcttgaatccgagaggcaaagattgtggtaagctgaaatcgtgccactgcactccaccctgggcgacagagtgatactccatcccccaaaaaagaaaatgtgaataccatatttttctgaataactgtgaaaaatttcctatatccatgtggaacaggcactttgtgactttttaaaaaaatgtttattatttttatatttttgagatggagtcttgctctgtcacccaggctggagtgcaatggcacgatcttggctcactgcaacctttacctcctgggttccagtgagtgtcttgcctcagcctcctgaataccttggattacaggcaagcaccagcatgcccggctaatttttgtatttttagtagagatgggatttcaccatgttggccatttgggattacgggcataagccactgcacccagtggcactttgtgacattaatgagtgcagtgtgtcagttatattgcatgccacatactgaatactcacatgtaaagtcataaaattcaattaacaaaatattgtaaccaacgataaaacaagaaaataatatgtacatttatacagcctgcagaattgtaaacaatttccacttaagaaaaaagccaaaacttctacttaccaccagcacacaatataagaactgaattacatgttaagatcactaccttctgatatatgaggtcaagaaaatacacagcattgccaggcgcagtggctcatgcctgtaatcccagcactttgggaggccgatgcgggcagatcacgaggtcaggagatcgagacctggttaacacggtgaaaccccgtctctactaaaaatacaaaacgttagccgggcgtggtggcacatgcctgtagtcccagctactcaggaggctgaggcaagagaatggcgtggacccgggaggtggagcttgcagtgagcagagatcgcgccactgcactccagcctgggtgacagagtgagactgtctctcacaaaaaaaaaaaaagaaaaaaaaaagtacacagcatttaaacgaataagaattgactaattgccaggcgtggtggtgcatgcctgtaatcccagcactttgggaggctgaggcaggcagatcacgaggtcaggagttcgagaccagcctggccaacgtgctgaaaccccatctctactaaaaatacaaaaaaattagctgggcatggcggaaggtgcctgtaatcccagctacttgggaggctgaggcaggaatcgtttgaatccaggaggtggaggtgtcagtgagctgagatcatgccactgcactccagcctgggcaacaggatgagactcaaactactcaactacttctcaaataagctttggtagatgtggtattctctaacaggatgttcctgcagatgcagacttggagagaatttagtcatgggtgttgactacctgtgaatactaaaagtgcatttataaagagacattaaagagctcattgcctgttcctctttcccccatgtcaggacatggcaggaagatggctgggctaaaccatgaagaatgctctcagcaggaaccaatttggctggcaccttgctcttggatttcccactttccaaattcatgagaaataaatttctgtgtctgaagcctcccagtttaagctatttctttttttgtttgtttttgagacagtcatgctctatcagccaggctgcaatgtagtggcacaatgattctcctgcctcaagagattctcccgcctcagcctggagtatcactctgacgcccaagctggagtgcagtggcacagtctcagcccactgcaacctctgcctccggggttcaagtgattctcctatctcagcctcctgagtacttgggataacaggcacttgccactgtgcccagctatctgttgtatttttagtagagatggcatttcactatgttggccaggctggtctcaaactcctgacctcaagcgatccacccaccttggcctcccaaagtgctggggttagaagcattagacaccagggccgaccagtctaagctatttttgacaggacagtgaaatgcctgagacaggaaaaggagcatctcatcatcagcctcacagaagacttacaaatcttattaaacaaaggaagttaacagtctgtactgtaaaacttgcaatacttgaagccatctaataccactaacaagttttcaaaaccttaaggcaagcagggcatggtggctcgcgcctgtaatcccagcactttgggaggctgaggtgggaggatcacgaggtcaggaaattgagaccatcctgcctaacacggtgaaaccatgtctttactaaaaaaatacaaaaaattagccgggtgtggtgacacgcacctgtagtcccagctacttgggaggctgaggcaggagaatcccttaaaatcaggaggtggaggttgcagtgagccaagatcgcatcactacgctccaggctgggcgacagaccgagactccatcttgaaataaaaaaaagaaagaaagaaagaaagaaaaagaaatgaaagaaggctaaagagtaactccaacccacaaatatatataaagttctccagtgaaggtaaataaaaggacagataggccaagtgcagtggtgcagcttatagcttgcagtgaacgccaagaatgaagtactcagataattccagctgagtggggcggggagcaaaccttctgagagagtgctgccccagaatccgtcctccaagtatttattgaaagggcttgtttagaccggtcgcggtggctcacgcctgtaatcccagcactttgggaggccgaggcgggcggatcacgaggtcaggagatcgagaccatcctggataacacagtgagaccccgtctctactaaaaatacaaaaaaattagccgggcgtggtggcgggcgcctgaagtcacagctactcaggaggctgaggcaggagaatggtgtgaacccgggaggcagagcttgcagtgagccgagatcgcaccactgcactccagcctgggcgacagagcgagactccgtctcaaaaaaaaaaaaaaaaaaaaaagggcttgtttaaactacacttcagacaaacaaaaaacatacaccatggagctctttgcagtcgggtcgtgaggcactatggccttgtaaaagcactcagaccacattcacaggagactgtttcagcgtttcttatcacacattctactccttgtcctgatttcagggtcaaggagtgacagtctcatacacaaacaacatacacacagtgcctcagtaattttccattcctcaatctcaaatgccttgtacataagcttatgttgccgcgcatccatcaaagttggttcacacccgtaatctcagcactttggcaggccaaggcaggtggatcacctgagtttgggagttcgagaccagcttgaccaacaaggagaaaccttgtttctactaaaaatacaaaattagccgggcatgatggtgcatgcctgtaatcccagctactcggggggctgtggcaaaagaatcacttgaaactgggaggcggaggttgcagtgagctgagattgtgtcattgcacttcagcctgggcgacaggagcaaaactttgtctcagaaataaataaataaataaataaataaataagtaagtaaatagacagatacagaaacctgtataagtgtatcttttctttataactcaacttttttttccaattatttagcagaaaaaagcacaaaaaaaacactgtacatatatgttaatgaaaatgcaacatatacagaaataattctgacataaataacaaagagttctagtggagaaagtagtctttgcaggttatggaaatttttgtttgtttctttctttgtttttttgagacggagtcttgctctgtcgcccaggctggagtgtaatggtgccgtttcggctcctgcaatctttgcctcttgaattcaaagatttcagcctcttgagtagctgggattacaggtgcccactgcacttcgaattttcagtagagacagagttttgccatgttagccaggctggtgttgaactcctgacttcaggtgatttgcccaccttggcctcccaatgtgctgagattacaggggtgagccactgcacctggccaggtaatggaaatttcaagttttgttattatgctataacttcaagatgtttaacacaccttcaacaataacctccccctaaatatctatacaacacacttcggttcttcatattgaaaggaatggacactaacgtggttgttatgttcacattggaatcatgcttaagccacttatatgtttactaaaaactaaaagacaaaactatttaaaataataataatggctgggcacggtggctcacgcctgtaatgccagtactttgggaaaccgagacaggtggatcacttgagatcaggagttcgagaacatcctggctaatgtgatgaaaccccgtctctactaaaaacacaaaaattagctgggcgtggtggtgagcgcctgtagtcacagctactcagaagctgggacacaagaatcgtttgagcccgggaggtggaggctacggttagaaagatcgcaccactgcactgtagcccgagtgacagagtgagacttcaccacaaaaaaaagtaaataagaagagagtcaaagcatgtctacagaaaaaaagtaattaaacacaaaaagtaggaaatgagaaatgaagaacaacaataaaaacctacaagaaatacagataatatgtaacaaaaacgcaacggtaaggtcttctccatcagtaattattaaaatgtaaatatttaactctgcattcaggaggcaaagactggctgaatcaacaggaaccaactacatgttgtccacagaagactcatattagccctaaggacacacatacgctaaaatttaaaaaataaaaaccaataattaggtatgggggttggggcctataatcccagctactcaggaggccaaagaggacctcttgagcccaggagatcaagaccaacttcaacaacacagcataaaactgaaaaataacctggagaaagcagggaaggatagtctgctggtttaccattttgatccctggtacagacagctcctctatttgtgccccctggcttatagcacaggctccatagctactgagtcagtgaatgaatgagaatgactgagtgatactagtatgtcttctctggggtctcatgtgtgccagggtcctatttgaccttggaatggtcttcatcgtgatgagggagctgagcaggagcagctgagcgggacagcccagagtccctcatgcagaccactctgcttgcccaaccggtaagaaggacaagtgtatgttcactcagaaacacatctggctgatccaacgggtcactgcctgaccctgagcaaacttacattggcaattaaagaccctaaactccgcagaaagaggagaggcttccttgctgcccggactctcaatgaagaaaaattcctggggtctaagacttctgacttggcaatgacattggcttaaatattcccagactcaaatccttgggtcttagttgggtcttgggatggtgcaaaccgatagaattgcaggcaatgagtgtcagaacagaacagcggacaggaaggtggaagacttgagggaggggatcaaggacaggcaaagaaaccactcccctccctcagacgcccacctggggaagcatcaactttgtcattctagagaagacaacgggaaaggaaggactgtgcatagggtaggtgacggtgtgtgctgggtggagagaaaaacccctttttctaaatgtgactccaatagctcagcccatttattctactaactgctgagcacagaggcatcctgtgaggataaatacggcttttccttcctccaattcctgaatctccaggccatgactagtgctgtaaccctcaaaatcccttcccaggacccagcgttccctctgtgggaaaaatatctgtgctccacatttagattatagcttatttatttattaacttatttatttatgttgagatggagtctcactaagttgccaggctggaatacagtggcacgatctcagctcactgcaacctctgcctcctaagttcaagcgattctcctgcctcagcctcttgagtagctgcggctacaggcgtgtgctaccaagcccagctagtttttgcattttttcaatacagacagggtttcaccatgttggtcagaatggtcttgatctcttgaccttgtgatctgcccgccttggcctcccaaagtgctgggaatacaggcataaactaccattcccggccatcatttttcatcttttatttttatttttatttttatttgagacagagtcttgcactgttgccccggatggggtgcaatgatgcttccatccagaagacagaagaagaaacctctgtcttctgggttcatgtgattctcctgcctcagcctcctgagtagctgggattacaggtgcataccaccacactcagctaattttttttttttttgtatttttagtagagacagggtttcactatgttgaccaggctggtgtcaaagtcttgacttcatcatccacctgccttagcctcccaaagtgctgggattacaggcgtgagccaccacacccagccccacatttacattataacattttgatcctcggctccccagctgccttctgactgtgtgtgtgggtgtgtgtgtgtgactgtgtgtgtgtgtgagtgtgtgactatgtgtgtgagtgtgtgactgtgtgtgtgtgtgcacgtgcgcacacactcatgtgttgtgacaggcaaggaaaagccagtagagagtcatcgccattggcctggcaggaggaggtggccctcaggctgcagttcacggtgctgtttgcactctgatccttggaagaatctttcctgaagtcacggagcctccagctgctccagaacagaactagttgtgtaggagtgtgtccttcatgcccctcaggtccctgaccttctccccacccttcctgaagggaatccaggaccctcactctgagtgcatcacctgctggtggcaaagcccctgcccatcatggccaaactgggccctggtgatgtgcagagcgtggagacccgggagctggagtgaggcagttgacacagatgacaaaaatgcagatgcctcggcactgcctgaggacacagggtctggtctgtagggcttttctggctttagtgaggtcttctccttttaatttgactgaaataaatagttacagaaagttcagatcaattagagttgaaatttccagaagaaatatgggaccatcctcacacttgccccagcccctcagtcttccctgaggacacctcagcatctaaatcacaactccagagtaggtgctgcagttgtcctgtggccaagatgagaactgtgcatcctccaaaggggagacacaaaacactcaaaataatccatgcagaagggcgtttctgcctgggcatggtggcccatgcctgtaatcttagcacattgggaggccaaggcaggcagatgacctgaggtcacaagcatgagaccagcctggccaacatggtgaaaccctgtctgtactaaaaatacagaaattgggtcgggtgcggtggctcatgtctgtaatcctaggactctagcactctagcggtctggaaggccaaggcgagcagatcacttgaggtcaggagttccagaccaccctagccaacatggttaaatcccatctctactaaaaatacaaaaagtagccaggcttggtggctgtctgtaatcccagctactcgggaggctgatgcaggagaatcgcttgaacccaggaggtggaggttgcagtgaactgagatcgtgccactgcactccagcctggatgacagagtgagactcaaaaatatgccaggaactgacatgacccactttagatttcgctgtgatgtcctcatacagagaaaggcctcgaagatggtctctgtgtctaactgaatctacacctctgtttctttcattctgcctttttttgttttatttttggggtactgcacctatttaaaattctagttacaactgaacactcctttctcacagaagaaaagccacgcccagacacgcactctattttgccaatcatttcaggggccagggtcactcgggttgagcttttctggtgtagcccctcatctccaagttacagggaggctcactggggccacaactgataagtcactgtcctctggctgaagaggggttgcagagggaagctgcctctgacgccatcattataaaagtcaccacacttagacacaggagtttggcaactctcattctcatctgtataatttaaacaaattttaaatttgttaccttataaacagagaaaacaacatgtcatcacttcatcgtcacatccaatcaactcaccgctcatctgcacccagggtcccccttcgtcttcattactgcttccctccatcattctgtacatagctctcattctcaccttctctgaaattgggattagccaggtgtggtagcacctgcctgtcatcctggctccttaggaggctaatgtgggtatcacttgagcccacaaacttgaggctgctgtaagccagaattgttccattgcactccagactgggcccaggagtgacaccctgtctcttaaaagaaaactttcaagtcagagacatattgagtcactagtgtagcttcaaatgcattacaaaatcagacacaaaatatctcccctaatttgtctccatttccagaatttacctgatgccagtgcacattaatgtatgactttcatatacagtttctctgatctggtccacaaagagctaaacgtccatccagatgtggcccctgaacaatccttgctgcccagcatcactgacaccacggagcccacaccccatctccatccatgtctggtgtgagcccttccaggaccatgcccagtgcagcctcttcctaagctcatgtcactaggttataagagatggaatttaagtgaagatgacagggactgagaaaaggcataagtgaatgcaagcaaatgtgtgaggcaggatgcttcagactcacaggagactgactactacaatacctggcatttcagaaaggaaagagacagattaatccaccgagaaatatccacttcacctgaggaagagccaccctggctccttttctttgctcttcttggtgtcttcctcatgtaacaggagtttttggaaatcaatcctgtttgtgaaaaaaaaaaaataagagatttaatgtttagaaaccactcactcctttcctgtgacaaaacacacacacaggggagacctcacccagtaggaagatggtcctctgctgcccaccacaccagagatcatgccaagataacaaagccccacaggaagacctacaagtgtaattttgacccgttttcagatcttgctcccctcctggaaaagtccacacacacactgcagcaggacacagaccttcagggcacagatctggccctaaccaaaccccatgcagagcacagccccctcagctccctgtggatcacaggctgatctcagctctcaacatggaggaaactgccttgattttcaatgctggacacagatgagaatcacctgcaccattgtaagaattattgagggtgggtttaatcctatgataatagcaatctctgataaaacagcttaaaagatgtatttgcaaaatgcctgagaaccctaatgtgaagccagggttgagctccactcagacagcgccagcccagcacagccccaccttctggctctgctctccacttcgggacttgttcccaccaggatccagtgaaaagcgaaggagcaaaaagaatcacaaagaacaggcaacatggaccagaggtgggggtgaaggtggagctgccatgtcaaatgggggactgtgggtgatcacaaacgtttccatagagaaagcaatgtcagaacaaagacttagggatgaaacactgcttgtcacttgtagctgaggggccagagagtcctgggcagagtgacatctcaggtgaaggcactgagacaaaagcaacctcagtcccagaaaaaggaaagaggtgtgcgtggctggagcagagggagtgaggaggacacaggcaggagatgacctcagagaggtcctggaagtgaagatccctagggacgaggtcttgaaacatttttctcccacacctcaaaagaattttggaaatgatgtatttcctcactcctttcatgtatacatgcaactttctctttacattgtaagttacaacactcacaaatagtggaatttatttcccatatttaaaatacatgctgtcagtttcagctaagctcccagaagtacactgtcgccctcatctgagaggtgtaggactgcaagggaatgtgtttgggggttcaagaagtcacttatgacttcttgacacatgaaggtggagatgcctgtttgatgtcccagcagagagctgaagagacaactggacacagaattgtggagctcaggggcgaggcctgcaggggacgtggagtcatacaggtgggctaaagcggtgagatgataaggttcaaggtgatttgattctaatctcattttttccttcttgtgcttttgttttttacatttttggaggactgaaatccatttaaaattcaaattacagctaagcacctccctgtcctaaaggaaaagccacacactccattgtgcccatcatttcaggggtcagtgtcactctgagcttttctggtcttctccctcacctgtatattacaggtgggctcagtgaggttcacagcgggggacgtttcaccaagttatcctgagaagctctgagttttgtaagaaggaggagtcgctgattttcatgtgatggccaggaagggtcaacaggctgcgttggtcatcttcctctataaaattccaggactggccacatgtggtggctcactcctgtaattccagcactttggaaggctgaagcaagtgggtcagttgagcccaggagtttgagacaaacctggcaacatggtgaaactccatctctaacgaaagtacagaaaattagccagacatggtggtgtgcatctgtggtcccagctatttggcaggctgactgggggggatcacttgggcctcagaggcagaggttgctgtgagccaagatcgtgccactgtacttaagcatgggtgacagagtaacactccatttcaaaaaaaggaaaaatattccaggaccatcttttatatccccaagcaaaagaaatgtctctttcaatgtccaaaattctgatggcacgaatcctaaacatgtaaatattttcccagaaaaatgacagtaatacattcaaaataaaaacaattgtgaacacatagctataggtttttaaaacactgaaagagaggcagtggtagaaataagctgtgagcaaatgttttcttcatgaacacgtgggctctgctgaaacaaggttccaagtcaatccagcccatccttcaacatctgcaaagaatattatggaccagaggaacttgaggagaatgtttacttagaaggtcacagttcaccattttatcagatgacataaggaaagaaagtagagtaacaggctacttgaactaaatttttatgttagcataaagaaaataggtcctagggtcaggcgtggtggctcatacctgaaatcccagcactttgggaggccagggcaggtggatcacctaaggtcaggaattcgagaccagcctgaccaacatggagaaaccctgtctctactaaaattacaaaattagctgggtgtggtggtgcatgcctgtaatcccaactatttgggaggctgaggcaggagaaccacttgtaccctggaggcggaagttgcggtgagctgagatcatgccattgcactccagcctgggcaacaagagtgaaactccatctcaaaaaaaaaaaaaaaagaaagaaagaaaatagattcttgacatctttatcaaatatgcattgaaacaacctaaaatcatttatcaggtactagaaagtgtttccaatatgtggtacagactagaaagcatgcagtcttcaatgtaaactggacacaataaatttcatagagaaactatattaaaatggttaaaaatatatacatctaatgaaatgtggggtcaaaggagaaaattttgaacacatagataaaaacaatgatgtgaggttgggtgtggtggctcacgcctgtaatcccagcactttgggaggccaaggttggcagatcacaagatcaggagtttgagaccagcctggccaatatggtgaaaccctgtctctactaaaaatacaaaaattagcctggcatggtggcgggggcctgtagtcccagctactcgggaggctaaggcaggagaatcacttgaacctgagaggtggaggttgcagtgagccgagatcgcgccattgcactccagcctgggcaaaagaatgagactccatctcaaaaaaaaaaatgatatgagctcataaaattctaccaaagcttatttgagaagtagttatttattttatgtttttgagatggagtcttgctctgtcacccaggctggagtgcagtgacatgatctcagctcactgcagcctctgcctcctgggttcaagcgattctcctgcctcaccctcctgagtagctgggattacaggcaccagccaccacacccagctaacctgtattttagtccagatgaggtttcaccatgttggccaggctggtctcaaactgttgctgttacattgggactgaatggaggaggacgaacacgggaatggagtatggagtcaaagacaaaagtatctgtttgcaagaagggatcgggggctctttgcttctagagaacaagagccctgagcttctacagcccttcatatttattgggtagagtaaacagagaggaaggggtaactgtcagtcaactatttaatttaacacaggtgtaagtgattgccttttttgttcaacaggctccagatgtttctgtagataatttcaaggaacatggcacctgggatgtgactgccctcagcattccttctggtggcagattcagttgtcaccttgccaactgctttcacaagaacagtttgctgtttgctcatacagcctccaatggtatactgagttgacaaccctcattccttcagtgtccaacatctccccctttatgtttttgcattaattgaataaaggtaattccaggctgtgcaactttcaattgccagttggtggtccacccagtcttacagactataaacagaaaacagagacataataacattgttcctataagtctaaaagagacattaaggtgatgtttaacgtaggtctaaggattgagactttctaaaccctgctggaattctgtccaagtttctaaagaaggttgaaactcttgagtctgcttattcaagtcaagaattttactttgtatttcactgatatcaaaagcgacattggatgtaaaagccccctgaatatgggcttttacaaggtcccatggatattcgatttggttatattccaaattggctacacaaatgtgagtatggttaaaatgacagtgcaattgctgttgccattgtaaactctgtatttgctcccctaaccacaaaacagtagtctttaacattgccacctaagtttgtaattcagtattaatttgattttgaagcatccatgcctggtcggctgtgcacatccaattttccatatattgggctgtttaaacagagctgtgcagtgctactgaggacaccacaacagaggttattagtgtgactaaggaaacaatagcaaaaattaccatacccaagactctaggagcatgatgagtgagctgagtgagaaggagtttcacaaagtgtaaagccagggcagcagcccaaggttcagacagattgacagggacccatatccaagaatgacatttaccttcttagaaaaacacaaactgtaaattgagtggtaatattccttacaaaggtaacattaaaactgtgttaagtaacattattagtattggagagtgtcccaacccagatgctgccgttcgtaaataggagtgctgctttccatatcgactcctgaattgggcccctctttccttgatgctgccactgaggcaaaggcgagctaaagcctgctctgtgccaagcaagccgcacagccgactgggattgaatcccagtgtgatgtagtgaagagatgttgaaggtctgccaccagtgccagcgaagtttgtgccatgaggtctgattctcatctcttccatctaattaaccacggggtccccagtcaccaatgtctcccattagcatagactgttgtctagctaaaggaccaagacattgggtccaaggaggggggtggtgagaactatcaaagggagcccattctgtataatcaatacaattttggtgatgggggcgggagtggttgatgagcacactagttatattaatagagctaaggcctaataaatacataacttttccatggtgactcaaccatgcctggggttggactgcaagacaactgtggttgagtgacatatctttggtgatgcataaagggagtccctccaatggggcggtataactgatgctattgttgtgagagtttaattgctctatatcagggggagttaggggccctagagcccacgctccctgatcatgatatacctcaggaggaatgtcactccagagtacaggtcacactacagggtgattaggaacatatgcccagtatgttttggcctctacacaggggaaacatacctcacaggacactactgctaacatggccaagcacatggatgctccagcattttctcagcttcctgctttgttttcttgatctgtccccatgttatgggggtggatgtcagtgtgactccagtcggcccttgctccatctttgcattcaaattcagctggctcacgactcctactggagggaccaggtccacggttggccaacgtgggtcctgctagtctcccatttcatggtcgcacacacctggagggcacccacatggtttgtccatctcctgtaaaaacacaagcatactctcgtccccacatcagcaattccaccgggcctttccactgtccctcatctggagatttccataacacctttgggtaaacttgcctcttttcctctaacacttgccaatgtcgttctgctagtcttaccgtctgtaccaggagtcaaaaagtttaaagtaagcaaggctaatgtaattttgcctgaggtggtagttggtctcctattccccctttttgttttttcaacatacgttgtaccgtttgatgtacccactcagtaaggccttgccctcgaggattgtaaggaattcctgttttatgggtgactgcccataactaaaaaattttgaaaggcatcactagcataagcaagttcattgtcagttttcaattgtttagggacccccctatatgggcaaatgacaacaatgtcaccaggcatgaccagctatttcccctgtttggcatgtggcatgcagcatatgggagtaggagtctatagtcacatggacatagctgagtttgccaaaggtggctatattggtaacatccatctgtcagatttcatctggagccaaacctcgtggggtgcatccttctacacgggcaacaccagggacatactggcaagtggggcaggcttgcacaatagcttaagcttggctgcaaggcagatgaaacatacgagtaagtgcagagttgttttgatgcagtaatgcatgagaagcttgggcttgttgaaatatagaaccgatcagtttatctgctctatcattacctagagatagtagtccagggagttgtgtgtgagagtgaatatgagaaatatgaaaaggggaagcatgagagcaaatagcttattggagtcttagaaacaagttaagcagttcttgttctagggtactcttaatagtggcagtctcaatgtgactggctacattcacaacataggctgaatcacagacaatattaataggagataaatctggaagctctaaaaccagaataactgcgattaattctgaacattgagctgaaactgcagaggtctttattgtttgagtgtgtttaggtccagaaacagctgcgtgaaatttggaggaaccatcagtaacataggtctgtccacctgaaataggcctgtgatgagtaatcacaggaaggatgaaagggtgaactttagaaaattgcgagattctttttttttgattgcttttgtcacccaggctggagtgcaatggcacgatcttggctcacggcaacctctgtctcccaggttcaagcaattctcctgcctcagcatcccaagtagctgggattaaaggtgcccgccaccacaccaggctaattttttaatttttagtagagatggggtttcaccatgtttttcaggctggtctcgaactcctgacctcaggcgatctgcctgcctcagcctcccaaagtgctgggattacaggcgtgagccactgagcatggcctaaaattgcaagattttgtctgatggataatggttacctattattcccacaaaatctgcgagagtgatttgccaaccagtcaacatctcccaagctgcagcctgctgtcaggaatccaaaggaacaataattttattaggatcatatcctgtaagcattcctgatctatgcctgcctattgtcataagttgtataattaaagaaagataaacttacaaagttttcactgtctgattggataaaaagagccattctattaccattatggatttctctatgaattggcctaaaagtcctgttggacaatgaggggtaggaagaataaaaaaagcaaaggcttttgtgatttcagccgaaaggcctgtcgtgttgaagcatctgctctacaagctgtaactcagcttctgcctctttagtaagttgccaaggggaatctaatgaagaatctccttggagggtttgataaaggtgtatgagttggtaagtagcaatacctagcatcgtgcacagccaattaatatcccctaataattgttggaaaccgttcagagtttgtaacctgtccctatggacggctactttttgaggctgaacatttctttcagtaaaaatagtacctaagtactggtatggggcggttctttgtaccttttcaggagctattttgagattccattcagttaaggcctgctttatttctctgaataactggtgtaatatttgaactgtaggagcggccaaaagaatatcatccatataatgaacgatgtaggcagtgggaaacatattctgagagtcctttaatgctcttcctacaaaatgctgacttaacgtaggtgttgagcatgccctggggtaaaactttccattgataatgagagacaggctctctatgattaatagagggcacagagaaggaaaatcgaggcttatctttctcatgtaagggtatagtataaaagcagtctttaagatctattactacgagaggccaatctctaggaatggctgttgggaatggtagaccttgctgtagtgcacccatcggttcaatctgtgcattaatagctctcaaatcatgaagcagtcaccattttcatgacttttttgggatcacaaatactggtgaattccaggggctgactcctctgtatgtcctgaatccagttgctcttttaccagctgatggagttgagtcagtttcttctgtgatagggggcattgattcactgccacacaggtttatcagtcacagggaggctcactggggctcagagcggggacattttcaccaagttaccctgagaaggtctgagatgagtgagaaggtgtgtctgaattcttacatggaggcctgaaagagctaatgggaagggttggtctttatcacccctatccttgaaaattagagaagcatctttcatatacctgggctaaagaaacttcttttgcaacgttctgatgccactgactcccaacatttaattcttccttacaagaaaatcacagtaacatttataaactgcagaagtgtgaacacacagctattgactgtgaaaacagtgaaagaagttcagccgtagagctaagacataagcaaattttttcaatcaagaatacatgggtggccaggcatggtggctcaggcctgtaatcccagcactttcagaggtcaaggtgggtggctcacctagggtcacgagttcaagaccaacctggccaacatggtgaaaccgcatctctactaaaaatacaaaaaattacctggtagtggtggtgggcacctgtaatcccagctattcaggaggctgaggcaggacaattgcttgaacccgggagacagcagttgcagtgagctgagatctcgccattgcactccagcctgagcaacaagagtgaaaatacatctcaaaaaaaaaaaaaaaagaagctgggcgcggtgactcacgcctgtaatcccagcactttgggaggccgaggcgggtggatcacctgagtgggttcaagaccagcctggccaacatggtgaaaccccatctctactaaatatacaaaaattagccgggtatggtggcaggcacctgtaatcccagctactcagggggctaaggcaggagaatcgcttgaacccgggaggcaaaggttgcagtgagctgagatcacgccactgcactccagcctgggcaacaagagcgcaacttcatctgaaaatgaaaaaagagagaaatggagaagaaccagaaagaaaaaagaggaaatctattacacaatgagaaaaaaagcgcttttgatattccttttgttttttattttttgtttgtttgcttttttgagatggagactcactctgccacccaggctgcagtgcagtggcacaattttggctcactgcaacctctacctcctaggatcaagtgattctcatgcctcagcctcccaagtaactggaactacagatgcacgccaccacgcctggctaacttttgtatttttagtagagacagggtttcaccatgttgaccagggtgcttttgaactcctgactttaggtgattcgctcacttcggtctcccaaagtgctggaattacagtcatgagccaccacgtccggctttgatgtcccttttaaaaagtattatgggctgggtgtggtagctcacacctgtaatgccagcactttggaaggccaaggcgggtgggtcaattgaggtcggaagttcaagaccagcctaacatagagaaaccctgtctctgctaaaaatacaaaattagctgggcatggtggtgcatgcctttaatcccagctacttgggagactaaggcaaaagaatcgcttgaaccggggaagtagatgttgtggtgagccgagattgcgccattgcactccagggtgggaaacaaaagcgaaactccgtctgaaaaaaaaaaaaagtactatgtaggagaagcgtggtggctcatccctgtaatcccagtactttgggagtccaaacaggaggatcatttaagcccgggattttgagaccagcctgggaaacacagtaaaaccccatttctacaaaaaacaaaaacaaaaaaacaaaaaaaaacaaaactagccgggcttggtggctcacgcctgtggtcccaactacttggtaggctgaggtaggaggacagcttgagcccaggaggtcgaggctacagttagagatcacgccactgcactccagcctgggtgatagagccagacactgtttcaaaatattatttaattaattaaattaaaagtcacatgtaataacagaaagtgcttttgtctccccacttcactgccccacttcctatgccaccctgggaaaagggaagagagtgactcacaactgaataagtcactgccctctggctgaatagggattccaagtggaagctgacctctgatgccaagatttatagaatgtacatgactcatagataggaattttaaaattctcaatctcatctgtataatttaaacaagtttttagttattagattatatacacagaagtcaacatgtcacactaatcatatccaatgaactcacccactcatctgaacccaaagtccccaccccttttattcttttgagacagggtctcactctgttgaccaggttggagtgcagtggcatatctcggctcactgcagcctggatctcctgggctcaagtgatcctcctgcctcagcctccagagtagttgggattacaagtgcgcaccatccccttctttggtctatttcttctcttccacctcttctgctccatcctcacaacttacttaacctcttgttgcttcttcttcccagtctttcgatcgtcctcaatctccatacattaccacctcttctcccacctctgcgcctcctctgctctccctgttaaactctctcttccctgttaaaccccctgtccccactctctggcacccccgacctccaggtgtcctccctgctgtggttctccctcttgccaccagcaccactctgctctgtctgccctggctccaaatccctcctcctctccctcactctgatgagccaggtccccctctttgctgcccctctccctaccttgctgtccttcatctctctgtacatctagcttctctccacatttctccagttttctcctcctgctatcttaactttttcttttcactcttgctgtctcttggcaaatccctcacccatcctccaccttgccatctgttatgggcctttctcattgttctattctctgtctcgagttttctactgcccttgctcggtctcctgattcctttggcccacacaatcacaggagagttttgagtaagacgcctgcatcccagaggagtgcattttccaggggctggggctgggcaggcaagaacaccccttgtcacaggacaagccctgggcacctccccaacgcggactcagaggaagcggcgactgctgaggggagacctggcgagcagcagggcccggcacgaggagggagttagggggcgacggctccttaagacaagggtggggtctgcaggatcccaggaccaggcagaggatgcggcctcctcgggacgggggaggcggcgctgcgctccagggaccgacgagggtgagggtgggaggcgcccagggtgggaatccacctctcgggtgaggactttaaaaagcacggggtggagggagtcagaaaatagttacaaacaggaaaactacgagatacgaagtgtatacgttgccctatagcagaaagaccggggacgggtctagcctcagggcgactttaaacccaaaaggaagcgacttctggactctcaccgggacgtcaaattttgctctggggattagccgggcctggtggcgcatgcctgtaatcccagctactcaggaggctgaggcaggagaatcgcttgaacccaggaggcggaggttgcagtgagccaagaccgagccactgcactccagcctggcgacagagcgagactccgtctcaaaaaaaaaaaaaaaaaaaaaaaaaaatttgctctgggcgaaggaagaatggtagaaatttccaggtatgtggggaccccacgtcccctgggacagaagtcccagggacctgcggagcgcagacataacacaacacagagcaaaactcaccgctgcggtgactttcactccacgcgatccgcttcccggtttacgctaaactgggcgctcgggacagaagccaggtctcggcgggacatggcagggggtgggcggggcctgggcgaggtgggggcggggcgcgaggcggagagaccttcccctatagaaccggcagggggcggggcgcgaggcggagagaccttcccctatagaaccggcagggggcggggcgcgaggcggagagaccttcccctatagaaccggcagagggcggggcgggatctgtgagtctctcagcctcggcgtgtttttgggttttggagacgagacctgccaggaaagctgaggcatgattcaaaagccctggaactgtctggaaggggaatgcaaaccagaatgtgaaatgcaaagccctgcctgggcggaacgtattatttcatgctgacgaccacagaacagaatagaaatcctctccctttctattctccactcactcaagagggagagtccaccctgtgtcagcttcagagacttccctagagccaccgcctgggatgcgggatggagtgctcaggccagggaggagtgaggtcaccacctgctggttaaacacagcagagatgcgggcgcacaagggggcgtgggagggcgcggggtgggatcctgagttcccagctactcaggaagcagcggcgggaggatcgctgagcctggggctccaggccagcctgggcgataaagtaacaccccctcccgcaggactcccttcctcgtcactctctctctgttttttgttttgttttgtttttaaactttcgtaaataaaattttttatggtgtgagacagggatccaacattatttttttccatgtggatatccagttacttgtcccagcacatttgtggaagagctctattactttcttttttcacttacttttttcttttctttttcttttttatttatttatttattttttttgagacagagtatttgtctgtcgcccaggctgcagtgcagtggcgagatctcagctcactgcacactctgcctcctgggttgaagcgattctcctgcctcaacctccagaatagctggcattacaggcgtgcgcccccatgcccggctaagttttgtattttttggtagagacgaggtttaacagtgttggccaggctggtctcgaactcctgactttaagttatctgcctgcctcagcctcccaaagtactgagtttacaggcgtgagttaccgtgcctgtcccaagaaataccctttttctttctttcttttttgagacggagtctcgtattgtcaccccagctgctgtgcagtggcgcgttcttggcttgctgcaacttacgcctcccgggttcaagcgattctcctgcctcagcctcccgagtagctaggaatacaggcgcctgccaccatgcctggctaattttttgtctactaaaaagtagagaccaggtttcactatgttggccaggctgttcttgaactcctgacctcgtaatctgccccactcggcctcccaaagtgctgggattacaggcgtgagccaccgcgcctggccaagaaatactctttacttcactttttaaatgttgagaaaatataattgaaaacaaaaaaaatcttcccctaaatgagatatcatctccaccacgataataaaagactttgccacatacatcactttcatattgtttctctccctctcccaaatggattatcggatgtttccttaagagtgagctacaattaaaggctttgccactctcactacattggaaagatttttcggccgggcgcggtggctcacgcctgtaatcccaacactttgggaggccgaggcgggtggatcactaggtcaggagatcgagaccattctggctaacatggtgaaaccccgtctctactaaaaatacaaaaaaattagccaagcgtggcggcgggcgcctgtaatcccagctactcgggaggctgaggcaggagaatggcgtgaacccgggaggcggagcttgcagagagccgagattgcgccactgcactccagcctgggcgacagagcgagactccgtctcaaaaaaaaaaaaaaaaaaaaaaggaaaacagcaagctatcgtgtttcctaccttcaaaacacggaaattttcaaaacttgcaggataaaataccacaacaaaacatttatcatgccgagctcagtggctcacgcctgaaatcccaacactttgggagtctgaggagggaggatcacttgaggccaggagttccagaccacctggccaatatggtgaaaccccatctctactaaaaataaacaaacagccaggcttggtggtgcacacctgtagtcccaactactctgaacgctgaggcatgagaatcccttgaacctggggggcggagtctgcaatgagctgagattgctccactgcgctccagtctgggtgacaggcgcattcatcaaagaattttttctaaaatctcaaaatggtgtctgaatacatttctgtaggacttacgctgacttgccacagaactctcagcagtgattccccattgagccatgggaacgggtggaaggctggacaggaaaggggatgcgtaagtgaacttttctttgaatttttactacacaacacatatatacattgtgtggtctttaaaatttaaaaaaattaataatgggtagaagaagaatatggctccatcttctctaatgataagttctgctctgacgtcagaacaaaattataatcatttttacctaaaatgcctgcttcatcagagttcctgcaaaaaaaaaaaacactttttttttcttttttttgagacagagtcttgctctgtcacccaggctgcggtgcagtggcgagatctcggctcactgcaacctccacctgccggattcaagcgattctcctgcctcagtctccccagtaggtgggactacaggctggcctgccaccacgcccggctaattttttgtatttttagtagagacggggtttcaccgtgtttcgatctcctgacctcgtgatccgcccgcctcggcctcccaaagtgctgggattacaggcgtgagccgccgcgcccagccaaaaaagaaaactttaataactttaaacatcagccatcacacggtgtgtgtgcgtgtgtgtgtgtgtgtgtaaataatctaggtaaactacaaaattagccgggtaaatgtaatggaatacatgcttgtaaacaaacttgtcataatttgtgatctaaggttattatttgacattagcaatctgggtaatttccagtttaagaattacaggggccgtggtggctcaaccctgtaatcccagcactttgggaggccgaggcgggcggatgcacgaggtcaggagatcaacaccagcctggccatcatggtgaaaccccgtctctactaaaaatacaaaaatcagctggccgtggtggcgcgcgcctgtagtcccaactactcgggaggctgaggcaggagaatcgcttgaacccaggaggaggaggttgcagtgagcagagattgccccactacactccagcctacgcgatagagccatagagcgagactacgtctaaaaacaaacaaactcagtctaaaaacaaacgaacaaaaaaacaacaacaaaaaaaaaaagaagaagagaaaatacagttacaaattttctaaataaatgtcctgagaaaagaaaggaagggaaagttgtccttcacctccagtgtgcaataggcagttccacatgcaggtcaccctccatgttccattatccgctcaaacaacacaggacctcgcttaaacaagccgttttctggggtttttttgtttgcttgattgtttgtttgagacggaatcttgctctgtcgcccaggctggagtgcagtggcgcgatctcagctcgctgcaagctccgcctcccgggttcacgccattctcctggctcagcctcctgagtagctgggactacaggcgcccgccaccatgcccggctaattttttatatttttagcagagacggggtttcaccgtgttagccaggatggtctcgatctcctgaactcgtgatccacccgcctcggcctcccaaagtgctgggattacaggagtgagccaccgcgcccggccccttaagctgttctaattctcagtcctggctgcaaccagcgccacactccacccttttaccgaggtccttgcccctcgccctccccctaccccagctaccccaggctgcggggagctcgccccgcctgcaggacgggcgtctttacctgctcacaaaaggcactttgcatttaaaccattttcaaattaagaagaaaaacaggtaattccagcactttcggaggccgaggagggcggatcacctgaggtaaagagttagagaccagcctggccaacatggcgaaactccgtttctactaaaaatacaaaaattagcccggcttggtggtgggcacctgtaatcccagctactcgggaggcggaggcaggagaatcgcttgaactcgggaggtgaaggttgtggtgagcccagatcacaacattgcactctagcctgggcaacaagagcgaaactccgtcttaagaaaaaaaaagaaaagaaaagctaccagttacacagcagggctcctcagaaagcagggggaacacctgtttcaagtttttcttgtataggggcctacgtaaaagctaactgccggtgggctgatggtgtgacaaaacttactactttgttgatttaaaacgatccttggtattttagtgtgcaagtacttgaaagcatggctgtaattatcttagaagcacacattgtcatgagatattgggtcatgtggacattgtgtttctgtaggagtttgtccttgcaaatatcattaagctgctttccttaaccattaacatcttatgactttgactcgcgcagtaaggagtacgttttcctagttttaatggacttgagctttgacatcctggttctcctaggttcctgcttaacagtgtatccactcatgcaccacagagtctcagcaccattatggaagacaccactctagtaatatatcaaagacagactgagcatctactccaataacataaatagtaatagcaatgctacggaaaatattaggaagtttaatgtatgtatacaattgatcatttattattttcagttttatattggctaaaactacattggatgggttattttaatcaaatattagaaatatctttcaaaactgcgatctaatataaacacacacagtttgagaccatttcctctatgttcaatatatatgaaagagttcagatttatgaacttattttatgtttttcattagatctagtttgttttctatcttgatttcttctgtgttcatgagcttgtgaaccaaaagtatctaataggtctcaattaatttagaaagtttactttgccaaggttaacgatgtgttttttgcagccaatgtggtccagatgcagctgggttttatacattttaggaagacaggagacataaatcaataaatgtaagatgtacattggtttggtcttgaaaggcagagtaatgaaaatcagagacttccaggttataggtagacaacagataaatgatagcatttttaaaatttatttttatttatttatttatttatttatttatttttagagtcttgctctgtcgctcaggctggagtgcagtggcgcaatctcagctcactgcagcctctgcctcccgggttcaagcgattctcctgcctcagcctcctaagtatctgggattacaggcacacgccaccatgactggcaaaatgtttaaattcacctatagcctgaaaccaacccatcccgctttgagttgccccacctttctggaccaaaccaatgtatttgttaaatgtatctcattgatgtttcatgcctctctagaatgtacaaaaccaagctgtgcccccaaccacctgtggcccatgttctcaggacctcctgaggactgtgtcatgggccagctcactcatatttggctcagaataaatcttttccagtattttacagagtttgactcttttcatcaacactaatattgctatgtcattaatttctaaatatattgtaatttcaaattcaccatgtgcattctgtaataagacaaatttcattttaaaattgtaacgtattttagatattttctttgttttctgtttctcaatgttctgtcacgtgtggatagcaaagccaataaaatactcttcagaagtcatttagatttattttcccttagagaaaaaataattttgcaatatttctaaagataaatggcaggcaagttattttctttcataggaactctcaagaaaggacaactcggccaggcgcactggctcatgcctgtaatcccagcactttgggaggcagaggcagggggatcacgaggtcaagaggtcgaggccatcctggctaacacggtgaaaccccgtttccactaaaaattagctggatgtggtggtgcgcactctagtcccagctactcaggaggctgaggcaggagaatcgcttgaacccgggaggcagaggttgcagtgagccaagattgcatcactgcattctggcctggagacagagcaaaaaaaaaaaaaaaaaaaggacaactcaattattaaatgtttacaagtagcctcatttcttcaggcaataattccatggcaatctccaacttaacatgtaatatggaagtatgttttcctgtcacagcattataattctgtattatgcaatattgctaagtagccaaaaaagaacactgagcctggacttccatgcttccatgcaaaaaaaaaaaaaaagaattgattgtgacagtttttgttaacctcagaacggtagacaagaagctgattgtagcggaaagtcatgattccattttgtatatgtaaagttttgttgcttctagaaatgtcaaggaagcaacatggacatactgattcacaagaaatttaaaagaatatttcctgccgggtgtggtggcccacacctgtaatcccagcactttgggaggccaagtcgggcggatcacctgaggtcagtagttcaagaccagcctgaccaacatggagaaactccgtctctactaaaaatacagaattagccgggtgtggtggcacatggctctaatcccagctactcaggaggtggaggcaggagaatcacttgaacccgggaggcggaggttacagtgagctgagatagcaccactgcactccagcctgggcaacaagagagaaactccatctcaaaaaaaaaaaaaaaaaaaaggattttcttaatcacagaaagattttgacatatacatccttgtaatatcattataagagaaatgcaaagtaattagatgtttccaaaaagttaaaatagaaactacttgttttttgaaaaagggtctcactctgtcactcaggctggagtgcagtggtgccatctcagctcactgcagcctcaacctttctggttcaggtgatcctcccacctcagcctccctagtagctgggactacagggcgtgccaccacgcccagctaatttttgtattttttagtagagatgggtttcgccaagttgcccaggttggtttctgactcctgggctcaagccatctggccgcctttgctttcaaacgtgctgggattacaggcatgagccaccatgcctgaaactactttcatctattgagcttatattatagccagtgtcacaggaaaaagcatgtgcatattctaacacagacggaacaatgaaaatgtttactactgggccgggcgcggtggctcatgcctgtaatcccagcactttgggaggctgaggcaggtggatcacaaggtcaggaaatcgagaccatcctggctaacatggtgaaaccccatctctactaaaaatacaaaaaattagctgggcgcggtggtgagcacctgtagtcccagctactcaggaggctgaggcaagagaatggtgtgaacccgggaggcggagcttgcagtgagccgagattgcaccactgcactccggcctgggcgaaacagagagactccgtctcaaaaaaaaaaaaaaaaagaaaactaaaaagaaaatgtttactactgtcaaaaaacaaatttagatattggttagattttattcaaaaggtatattgcaatagggaaaatgctccaaccccaagatctgcaaatatatgagttgcacagaaaagggcttctcttttataaggagaaggaagcaaggttagaaagcgccaggtacagggcagtggataagcatctgctgtgacctattcagtgaatattttatcctaaggtcagcttactcttgggatgggacattaaaaaggcaaagttgggctggacgccatggctcatgcctgtaatcctagcactttgggacaccaaggcgggtggatcgcttgaggacgggagttcaagaccagcctggccaacatggtgaaaccctgtctctactaaaaataaaaaaattagctgggggtggtggcacaggtctgtaatcccagctactggggagtttgaggcaggagaatcacttcaacccgggaggcagagcttgcagtaagccaagactccatctctaaaacaaacaaacaaacaaagagaagttgttctcaatcacagtgcccatatgtggttaagaaatagaggttgttagccgggcacggcggctcatgcctgtaatcgcagcactttgagaggccaaggcaggtggatcacctgaggtcaggagttcgagaccagcctgaccaacatggagaaaccctgtctctactaaaaatacaaaattagccaggcacagtggcgcatgcctgtaatcccaggtactcgggaggctgaggcaggagaatcacctgaatctgggaggcagaggttgcagtgagccgatatcatgccattgcactccagcctgggcaacaagagtgaaactgcctcaaaaaaaaaaaaaaaaaaaaaaaaaaaagagagagagagagaaatagaggttgttctgaatttcaatggccaagaatagtccaacagtcaggggcttggagaaacagggaagcctaaggtttgagtaagttaagaagcattgtttccaccatcagtgagaaatccttgatgagacaaaccgtgggaatttggagttttttcttatgtaaacaaagagggtaagctttgaagtaagctgtttctagggaaaacaaaaacaagggattgggcaggggagtggtttccggtgggttttatttgtttttttgtttgtttgtttttgtttttgtttttgttttgcttttgccctagaggcctcaagaggcctggggaacatgtgctcctctggtggtttcttcaatctttgctatttcttcaaccctttactaggtttacagggttgtaataaacttcaacactgtcaccacacgtaacataaaacaaaatttaaaaaataataaatataggccaggcgcagtggctcacacctgtaatcccagcactttgggaggccgaggcaggcggatcacctgagatcaggagcgagaccagcctcaccaatatgaagaaactccgtctctactaaaaatatacaaaatagccaggtgtggtggtgcatgcctgtaatcccaactactcaggaggctgaggcaggagaatcgcttgaacccaggaggcggaggttactgtgagccgagattgcaccattgtactccagcctaggcaacaagagcgaaactccgtctccaagagaaaaaataataatacatgtgtagaatttgaaaaatagaactaaaaataggaacaatagcgatgttgccccatacctcagtttttgaatggaacgaaagggccttgagtgttcattttggctgtgtgttattcattcctatcacatacaagagacattagtaattattggaagatatggctctaaatctctaaattcaggggtctgtgtaactgttaaattgaacagaaacctagagatatattaagacaaatagtgggctgggtgcgatggctcacacctgtaatcctagtactttgggaaactgaggcgggtgaactgcctgagctcaggagtttgagaccagcctgagcaacatggtgaaaccctatctcaagtaaaaatacaaaaaaattagccaggcgtggtggtgtgagcctgtaatcccagctaatcgggaggctgaggcaggagaattgcttgaacctacctgggaggcagaggttgcagtgagccaagatcacaccactgcactccaacctgggtgacagagcgagactctgtctccaaaagaaaaagaaaaagaaaaatggtgtttccttttccattttcctgctgaccatggaaaaacacactctcacagttttatcaattctttggtaacaattacaaaatgcaagcactggttcacgtcgacagcccagagtccgcaaatcctctgctctgagcccgtccggacttccccgatcccagccttctctcctttgaaaacactaagaatgacatcactgcatcagtttttactagagccaatcacctgtcgtgcctggaacagggatcgtacccagattgccctcagtcctgataatcaggaagcgcacatctataagaagcatgggagccagcgagtgaaagctcgtgaactcagtgagcacaatggacatatcacaggcattcactgggctcccaagagcgaccgcatcgtcacttgcggggtagactgcaatgcctatgtctggagtcagaaagatggtgtctggaagccaaccctggtgatccttagaattaatcgtgcagctacttttgtgaagtggtccccgctagagaacaaatttgctgtgggaagtggagcatgactcatttgtttgttactttgagtctgaaaatgactggtgggtaagcaagcatattaaaaagccgattcgctccacagtcctcagcttggattggcatcccaacaatgttttgctggcagcaggatcatgtgacttcaaatgcagagtgttttctgcttacattaaagaagtggatgaaaagccagccagcatgccctggggcaccaagatgccttttgggcagctgatgtcagagtttggtggcagtggcaccggtggctgggtccacggggtaagcttctctgccagtgggagccgcctggcctgggtcagccacgacagcaccgttatctgttgctgatgcctcaaaaagtgtgcaggtctcaattctgaagacagagttcctaccactcctgagtgtgtcatttgtctcagagaacagtgtcgtggctgctggccatgactgctacccaatgctctttaattatgatgaccgcggctgcctgaccttcgtctccaagttagacattccaaaacagagcatccaacgcaacatgtctgccatagaacacttccgcaacatggacacgagggccacgattgaggaccacaacatggccttggagaggctgcaccagaatagcatcactcacgtctctatttatgaggtagacaagcaaggttgtcgcaaattttgcactactggcattgatggagccatgacaatttgggatttcaagaccctcgagtcttccatccaggtcctccacataatgtgaagctgagtgagccttcgccatctagcatgacaaactgtggccaaccgcagctgtgccgtggcacgatggcgaggaagctagacccaaggaaacactgaaaacacatagcaggccaatgctgtgtggttttgtttgaatataaaattggtgaaaatgctggtttttttaaagcagtatttttttttttatttttttattttttttgcgatttcattccattcttgaccaaagcttccctttaagtagtttattatggaaaattgtcacactaacttaaaagacagggtgagggagatatgtaaattgtccactagaaaattaaataaaagaactaaatgtgggaaaaaaaaaaagaaagaaagaaaatacaagcacttaggtcgggtgcagtggcttacgcctgtaatcccagcactttgggaggctaaggcgggtggatcacctgaggtggggagtttgagaccagcctgaccaacatggagaaaccccatctctactaaaaatacaaaattagccaagcacagtggtgcatgcctgtaatcccagttactcgggaggttgaggcagaagaatcgcttgaacccaggaggtggaggttgcagtgagccgagatggcgccactgcatgccagcttgggcaacgaaagcggaaaaaagaggccgggcatggtggctcacacctttgggagcactttgggaggctgaggtgggtaaatcacctgaggtccggagtttgagaccagcctggccaacatggtgaaacccatctctactaaaaattaaaaaaaaaattatctgggcatgctggcgggcgcccataatcccagctacttgggaggctaaggcaggagaatcccttgaacctgggaggcagaggttacggtgtgccgagattgcaccactacactccagcctgggtgacagagtgagactccctccccaccgcccccccaaaaaaaaagaaaaaagaaaagaaaatactagcactaatttatatgtcagattcatgtcacatctcaaattcatctaaattttcttgacatccctttttataccagtggagccctgatgaagacacttaatagaagttttctctctatcagagaaataagttgatgagaataaactcaacgaaggtgaaaattctgtttttttctgtgacctgggggaaaaagcttaaggtgaatttacattcagattggttatacagagagaacatacagaagtggatgaactcggtgtaattaagtttttctatccacaaaccaggtgaaagtattgcaggaggcagatagcgaggcatgagcaggtaaggagattctgtgtcacccgcaaggggtcctgatccagaacctaagagagggttcttggatctcacgcaaggaagaattcaaggtgaatccatacagtaaagtgaaagcaagtttattaagagagtaaaggaataaagtatggctactccatagtcagagcagcctcctgtttcatcctatgactaagaatgccttcacttactgggaatgtaacccagcaggtctcaggcttattttctccagcccctattccagatggaattgctctggttcaaatgtctctgacactttggaaaggaatatttagaaatgcaactcactggccaggcacagtggctcatgcctgtaatcccagcactttgggaggccgagacaggtggatcacgaggtcaggagatcaagaccatcctggctaacacagtgaaactccatctctactaaaaatacaaaaacttagctggcctggtggtgggcgcatgtagtcccagctactcaggaggctgaggcaggagaatggcgtgaacccgggaggcggagcttgcaatgagccgagatcgggccactgcactccagcctgggtgacagagcgagactctgtctcaaaaaaaaaaaaaaaagaaaagaaaaaagaaaaaagaaatgcaactcactgagagtctccttaaagatgctgcccactgacagcaagaaaagatcagtggctacattgcctccacctggccttgtggctgcactcctctggcccagaaggggacttatcaggggctagctggacataatcgagatgggggattttccccattaacaaccatgtgtacttctgcaataacccaccctagaagagccttctgctcaaaatgatactgaaacacacatccctggctggagatttgagatgctaatgagatatgtgacgtgtgtaccagcacggaccgtcacagggctttcctgatcagaggacttcctggaacgtgcttactaggaacatccctgcacagccccttcatgaataatcatgtcagattctcacaaaaaggctctgcccaacactagtagggacaggctcattcttttgaggagcccaccctgctccactgttcagggtatctcttctttccgagctcctacgcctttagataaagggcacttacctgcttaactctttctgcgtgtctcttgactgaattcaaggagaccaagaaccagaggacttccacgcccctcctggtaacatctggtgttttcccctggtggcctgtgaactgttcttctgggtaagtgccaaaaagctggtgccagatcctctggttgacgacctctgcttctttctgcactgaagaacctcctgccctaatgcagatcttgcagccttaaggggaggggcttttcctctcgggctctgttcactatcaactgcccagtaccatttcccttcagccactgtcactctgctccctctggctgacttctcagctcaccctgaggggtgacaagcagaggagggaggatttaaactccacagtgagtagatctgagacacggtgaccctccctgcaggaggcttgtgaaggtggcagaaaatccaccctggctgtgcagtgactggggagcttcatatcttcaactaaaactactattccatgttgagtcggctcttctacttgctgttcatggcagttcattctcctggacacaatatgccgccaccggtgaataatcccccaggtcactctgcttactctttgctgtccctgtcctcgtcgccgggcttccttgaattcctccttcgtgtacaagtgccttgtctgtcctgcttgtctgggacctgctgcgtttgcttcactgccaatcgccggaggcctgcccgggcctgtgaggaagtttatacttattttttccctagagatgagacccagcttcgtcctttcagttgcctcctttctcactgcagggaccggcactggcaggatgctcgcttacaggcatccctcgtttactatcgggtccttctccgcccgactactcttcaagaatgcctcattctgtggctcctcaagcgagctgtctggttcctccggatggtcatttataggcctctttctcagaccccagtttctctttacaaccggggtttcctgtgggtcaatgggaagttcttcatccgcctcctcaagccattgttacagacctgtacggcagtcaggtgctttttgtattatgttgaaaaagctgacagaaaatgcccccggcactccccttgctgcttatgtgatcatatcagggacgtaaaaaaccagaatcaacagcccagtccactaactctgagccccaggggccttccatgcctgtttaagcattttttctgtatgatccccaaggaacctactatgaccaggggaagatatcaaatttacctccattcctctaaccatctgtatgcattaatccaatattatcatgcattaaggggaccttaccatggagtcccttctctgcagactttagcaggggcagaactactggacttcttgcagaaccaaggtcactgggaatatgagagacaagagaactactcccatgcccgacgttcttacatgcttcctggcccaacacagaggtgagaaaggcgtccctcctaggcatcaatcctaggaaatctaagaaaggcttctgagcaaaatgagatacagggagacaatggatggtgcaaatgctaaggctagctaattctggagccccagggtgaagaaccaatcatccctgtaaatagaggcatggacacttcacctaggccaaggtgtggaatgcctcaccttcctgaggcacccaataggtggagagatgccttctctatcctatattcattcctgtcttctctttcagatgggtaaccagagctccgtaccccaggattcccctctcggatgcatccttagaaactgggataagtttgatccccaggcattgaaacgaaaaagattggtttttctttgcaatacagtttggccaaaatatgaactagaagggcaggaagcctggccagtggggggaagcttaaatgttaataccatactccagcttgacgtctactgccgacagcagcgcaaatggtcagaggtcccttatgtgcaaaccttcatgatcttgagggaaaaccccgatttttgtaaaggctgcaagatagatcctgcccttttagctatcctcagtcgtccactccagagacctcaaccaggaggcttcaatgatttcctggtcaacccacctcaacctcctcttcctgagaccaaagagaaagagcaagcacccccagctccttcctccttgtatcgcactcttagccttcatgggtcagcctcaacctacactaggccctcaggcccccgctctggaatctgcctgctaccagtggtgagccgaccagtaggaccagtccaagtccaggtccccttttccatgcaggacttgtcccaagttaaggaaggcctgggaaaattctcagagaatccgggaaaattcctggagggcttccgtaaattaaccctcacttttgaactaacctggaaggatgtcgccatcctcctaggacaaaccctgtctctggaagaaagacagaccatctgggaggcagcacgtcaatgcggggatgagctacacttggcagatgccaactaccccgtgggagctacagctgtccccctgcaggaccccaactgggactacgataccccggcaggaatctgcgccagaaatcatatgctcctatgcctgatagagggaatgaaaaggagtcaagtcaagcctgtcaattataataagttagcaaccatcgaccaagggccacatgagaatcccacggcctttctcgaaaggctccaggaaactcttatcaaacataccaacctagacccgggatccccagaaggacaactagtcctaaaggatcacttcctcacacaagctgccccagacattaggagaaaactgcgaatgctggctttgggaactagagcccccatgtcagaaatcctcaaattcgcttcctcagtgttttataaccgagaccaggatgagagggacagggccgagaggaaggaaaaacagaaagaagagaggcaggctcaattactagctgctttgcaagttcaccagccccctccaggttgccctaaggataccttcccagggaactgctatcagtgcgggaagccgggccattggaaggcaaactgcccctacgggccaaggggggaaaagccctgcacggcctgtcccctctgccgtaagctcaggtactggaaagagaactgtcccgagagccaaaagggcccctgagccaatgatggctttgagctgagggtgccctctgccttggccagctcccagatgtgacatcatcatcaaagggatggagcccagggcaactctggatgtagcaggtaggacaatacattttctatttgatttgagagcagcctgctcggtgctgacccccttctctaggcaactttcctctgtcaggtaatcagggtaaatggcatctcttcctaagatttacaccttctttattgttaaaagaccaattaatcttttcccatgagttcctgatactgtctgaatgtcccatacgtctttagggcagggatatactctccaaactaggggcacgcttcacatttacctgaacttccctgaaaggctttctttttttttggaagactcacccatgacattgctgaattatcttgatctggaatcacaaataaccctgagatatgggctttgatacactaggaagggcaataactgcagtcccagtcaaaatccagctaagaaaaccttccacttctttcataagaaacaatactcgctatggccagaggcaacagaaggacttgagcctatcattaacccattccttagacatggcctgttaaagtctgtaactctccctgcaacacaggaaatctattctgctggtagaaaacatttaaagggttctccactactgaaccctgattaagtctggttttctgatggcggcagtttcatccaacatggagtgacacatgcagttatgcaatagtgtctctatttgacattatagaagccaaatcccttcctccaagaacattggcacagctagcagagctcatttccttaactagagccatagaaatagggaaaaacccaaaagctacaatttatacagattcaaaatatgccctctcaggactccatgctcatgtggccatctggaaggaacagggatttttaccagcaaaagatacccctaaggaatgtggaccacagatcctggccctgctctaagctgtacacctatcacaggaaatagctgtagtccatggccagggacaccaaaggaccagggagaaaatgcccagcaaaacaggagggtggatcaaacagccaggaccactaccctgtagggaactcctcatggcccttaacccatctttacccaacaccttacccacccacaaaaacccaagaggaaaaggaatgggctatcaaatatgaatctacccgagaacctgaggtgtggtatacagtgggaggaattctccactttcctaggccctccagtaaaaacttgtgagagcactccatgagtcatgtcactttgggagacatcatctccagcacatgtgcaaaaacctcttttccaggaaagggctctactagactatttgtcaggtctttaacacctgtgcatcctgtgcctgtaatagcccccagggccctacgctgccctgcttttttttttttttttttttttttttgagtcaaagtttcactcttagtacccaggctggagtgcaacggcgtgatctcagctcatcgcaatctctccctcccaagttcaagcgattctcctgcctcagcctcctgagtagctgggattacaggcaggtgccaccaaaaaaagaccaaaaaaaatttttttttttttttggtatttttagtagagatggggtttctccatgctggtcagactggtcttgaactcccaacctcaggtaatccgcctgcctcggcctcccaaagtgctgggattacaggcatgagccaccgtgcccagccaaatttttttttttgttcaatgttgcccaggttggcctcaaacgcgtagccttgcctccttgtgacccaggacaaccggccagagccaatgcagctccctgtcctgcttagttgagccagttcagcattgggaagcttacccagggaaagactgatggatgtatttcactcaattgccagcctgtagaggctataaatgccttctggtgtttgtggacacctttattgggtgggttaaagcctttcctacaagaacagaaaaggcccaggaagtagccaaggtacttcttaaaaaaaaaaaaaaaatcatcccggccgggcgtggtggctcacttctgtaatctcagcactttgggaggccgaggcaggcggatcacgaggtcagagaattgagaccatcctggctaacacagtgaaatcctgtctctactaaaaaagagaaaaaattaggtgggtgtggtagcgggcgcctatagtcccagctactcaggaggctgaggcagaagaatggtgtgaacccgggaggtggagcttgtggtgagctgagattgtgccactgcactccagcctggacaacagagcgagactccgtctcaaaaacaaaaagaaaaaaaaaatcacccctcagtgtgggtttagtttgtgtttacaaagtgacaacggcccagtttttatttcacgcaccctttaattagtgacaaaagccctagaaataaagtactcctagcactcctggagaacacattcctctggcaaggtagaaagcactaatcaaactattaaaaggaccctgaacaaagtgtgccaggaaacctcctcaccatggttagaactcctgtccgtagcactgttctgagcatgacccctaatattacttatgccttcctacatgcagacctaatgttagatccagaagttacccaattaatcaaatacataacatcactggcccaatttcaacaagccatccaggagtttgagcaaaaggtactgcctgccactgacccctccagtaatcaacccttatactagccagggtcacaagtcctcatcaaaacctggagagatgggtcacccaggtctcaactagcctgggtctctcctttatggaaaggcccctttattactttctaccccgacagctatcaaagtttctggaatctctagttggatacatcactcctgagtaaaactgtgagaaggtcccgaagaaccaacaacagaatcagcatctgagtagtctcatgagccagccactggagagcttccaattcctcttcaagtgaaaagataagtaaagccttctctcctttcacctcaaaaaaaggtctctcagtacggggaatcttggttgcggtggcatcggttcttctccttattttgacccacactggcatgccacctgaagtcccgataacagcctgatttctcactaaacactccatcgaaccatttcattatttgtctctcctattttcagcactttccttttgctttcacaaagcttaagggagaatcagctatgacagagaaattccttttcctttatctttccctccttcccatgcccctactctcacaggcacagtggaatgaaaattcccttgtcagtttttccaaaataattgcttcgggaaaccatctaagcaactgttggatctgccacaacttcatcaccaggtcctcatcttaccaatatattttggtaagaaatttttctttaaacctaacatttggttcaggaatccctgaaggccaacataaatctgttccgctccaggtttcgcttgctaactcagcgcaccaagtcccctgcctggatctcactccacctttcaatcaaagctctaaaacttctttctatttctacaactgctcttctctaaaccaaacctgttgtccatgccctgaaggacactgtgacaggaagaacacctctgaggagggattccccagtcccaccatccatcccatgagcttctccccagcaggctgccaccctaacttgactcactggtgtccagctaaacaaatgaacgattatcgagacaagtcaccccaaaaccgctgtgcagcttgggaaggaaaagagctaatcacatggagggttctatatttgcttcccaaggcacacactgtccccacatggccaaaatctactgttcccctgggagggcctctatcccctgcatgcaatcaaactattccagcagggtggaaatcgcagttacacaagtggttcgacagccacatcccccggtgggcctgtacccctcctggctatgtatttttatgtgggccacaaaaaaataaactgccctttgatggaagtcctaagataacttattcaaccccccctgtggcaaacctctacacttgcattaataacatccaacatacgggagaatgtgctgtgggacttttgggaccacgggggataggtgtgaccatttataacaccacccaacccagacagaaaagagctctgggtctaatactggcagggatgggtgcggccataggaatgatcgccccatggggagggttcacttatcatgatgtcaccctcagaaatctctccagacaaatagacaacatagctaagagtaccagagatagcatctctaaactcaaggcctccatagattctctagcaaatgtagtcatgaacaacagattggccttagattacctcttagcagagcagggtggagtctgtgcagtgatcagtaaatcctgttgcatttatgtcaataacagtggggcgatagaggaggatataaaaaagatctatgatgaggttacgtggctccataactttggaaaaggtgattcagcagggtccatttgggaggctgtgaagtctgccctcccctccctcacatggtttgtccctttactgggaccagctgcacttaatagcctgctttctcctctttggcccttgtctctataattcactaattaaatatgtctcttccaggatatggcaatttcacacagagcccctaaaaatggaaagagatcatccaatcttccttggaggtcccagcacctacaagtacatatctcccttggatgccagtgggcaaagattctgcaactacggaggggctccttccctgacagagagcaagagagggagaccctgatgacttcttcgtcccacgtcagcaggaagtagttacagaagacccacgacgtccttatgcccaaagcttttcagggtctccaactcttgagggggaatactgttagggtaggcaggtagccagacaagagcaggcaaggaagcccctgggaaaggaatctttagaaatgcagcccgctgatggcctccttggaaacgctgcacgctgagtcagcaaaaggaggagcgtggctacactggctacacctggccttgtggctgcattcctctgttccagaagggaacttatcaaggcccagccagaggttaccaaggtaggagctattccccactaagaagcatgtatacttctctaataattcaccctaatataccattttgttcattaaaataataaaaaaaaccacacacctgtgtggagattttattttttaaccagaaattccttgttagactttagatccaaatgacatggcacatgtgtgcccagaccagttcccaacacatgcttactagtaacgcccctgcatgaccccttcatgaataatcatgtaaaattctcataagaagcatctccccagccaggtgtggtggctcacgcctgtaatcccaacactttgggaggctgaggcaggcagatcacctgaggtcgggagcgcgagaccagcctgaccaacatggagaaaccccgtctctactaaaaatacaaaattagctgggcgtggtggcgcatgcctgtaatcccagctacttgggaggctgaggcaggagaatcgcttgaacccgggaggcagaggttgtgttgagccaagatcgtgccattccactccagcctgggcaacgagaggggaactccatctcaaaaaacgaacaaacaaaaagaagcgtctccccagcattggtgagacagactcattcatttgagcagcccagcctgttctgtctttcagggtgtactgtttatttaaaagcccccataaaaattcctcccaggccaggcatggtggctcaggcctgtaatccctgcacttccttgggcggatcctcagacagatcacagctcaggagtttgagaccagcctgacaaacatggcgaaaccccgtctctactaaaaatacaaaaaaattagccgggcctggtggcacgcacctgtaatcccagctactcaggaggctgagggaggagaatcacttgaaaccaggaggcggaggttgcagtgagccaagattgcgccactgcactccagcctgggctacaggagactccatctggggagggcggcggggaattcctcctaagtcactagcagctgactcactctctgcagcagccagttctgtctcttcttgacctcctgtctttaaataaaggttacttaacgatttaactctttctgtgtgcctcctagatgaattctttccttcaggaagataaactgaaggacctccacacccctcctggtaacaaaggtctttgtgcaatccctcctgaagaagcaatggaggatttagtatatctaaactagtaaatacaaactgtactcaattatccaagaaatcattgaagaaacactctttactccattttttatatcttgggaaaaatataattaaagacaaaataatatttgccaaacccagaaatcctcaccaaaaaggaaaaaaataaataaacaatcccagttggtggctggtgaatgcttctaccttaatcaatacatgttttgaagctgtcagcttctttttgctcataagtgactccacagaatctagtctttgctttgccctctagacaaggaatacagaatttttaaatcttatcagaaacatataaattgtttggttttgcacaatatttactaattttctccactcatccactgtggagtcatagcacaaaatgaggcaccaccctctcgtattgcaactaaaacagactgagcttctgctccataaccataaacagtaatagcaatactaattgaaagatgaagtaattttacgtaagtaggtataaaactgataattcattgttattttcagttttacaataagtgggaattacatagaataaatctttctctctctctctttctatttctgacagtcccgctctgtcgcacaggccaaagtgccatggggtgacctcagcttactgcaacctccgcttcctgggttcaagtaactcttgtgcctcagtctcctgagtagctgggattgcaggtgtacaccaccttgcttggctaatttttgtatttttcatagagatgaaatttcactatgttggccagagtggtctcaaactcccaacctcagatgatcagcctgccttggtctcccaaggtgctgggattacaggcatgagccaccacacccaacggagttttcactcatttactttaatcatcatgggttagagatatagcttttaaaaatgtaattgaatatacccttacagttaggatctaaaaagagcatttcctctattaatgtttattaaataatatggtggaactcagacttgctctgttgcccaagttggagtgcagtggcatgatcttggctcaatgcaatctctacctcatgggtttaagtgattctcgtgcctcagcctcctgagtagctgggattgcaggcatacaccaccatgcctggctaaattttgtatttttactagagacagggtttcaccatgttgctcaggttagtctcgaactcctggccacaagtgatccacccaccttggcctcccaaagtgctgggattgcaggtgtgagccaccacaccagcttaattttttttctttttcttttcttttcttttcttttttttttgagatggagtttcactcttgttgtccaggctggagtgcagtggcacaatctcagctcactacaacctgcacctcctgggttcaagtgattctcctgcctcagcctcctgagtagctgggattacaggcatgtgccaccatgcctaattttgtatttttagtagagatggggtttctccatgttagttaggctggtcttgaactcccgacctcaggtgatctgcccgtctcagcttcccaaagtgctgggattacaggcgtgagccatcgtgcccagcaattttttctatctgagtttcttccgtactaatcagcttgtgatagacacatggtttctgaaacagaaaagtgcaagggctttttatgagcagggtgtggaagactaccagtaacaaatgctttggcataagtgatgagtgagaaggggagtgagagtctctactgtcctacctactaattgtgctttgggaatttggattgaaaaaagccaccttaatggtgtttggttatcatttattctcccccacctggcaggaaataaggacagggtccccaaagctgctagggcacttagggtggatatgaaacattaaaatatgaaacattaaaacttcacttgcttgaaaccagagcagccaccaaactgctcaaaattactgccaatgatgtcttgcttcctggcattcagaaaccttctccttctctacccctgactcttccttccctctctatcccaatctcaatcaccttaaggaagagctgagtatcctgaaaaatttgaaaggaaaaaagagattcaaacttttgtagctctcttggtaagaggtgccccaatcaccttccgaggagaaatgctttgtaggagtgtctcaaaccaccaagacctgtgggaccaagcacatatggggcccataggaagaagccactgagcctcaggatcctccagatgctgggaggtacatggagcagcaggcagcattatgcttgtatcaagcacccaaggagaaaacaaggccactgagctgccccagccttccctgacatgattgtctcctatggccctgggtttgtttggagacctgcaacataactgtaattcctccttctcctttgtgagttcaaactaagggtaggtttgctaccagtcttttaaaaaagattggtgccactcttgcttacagggcagagaaggcacccagaatggtggccactggcaccccactcccaagccaataccacctctagtgtaaccatgcacacaatctccagaaggggaccccagcccctgacccagctgcattgtctctgccactgtggtgaacacttgcatggaggcaggtactctggcgccctctagcactctggctcttgaggagtcagaggaaaacactggggcccaatacaagtcccctaaagttagagcacacagtccagataagtgctggccccctaaaatcttccagaaatgaagccagtcagctgaatccaccttataccacaatccacaatcaaaccctcaaggtcatcaaatagttatgataaaagtaaaaaacaaaaacaaaaaacaatcctcatccaaaggtcagcaacctcaaagactgaaggtagataagcccaaaaagatgagaaagaatcagtgcaagaaccctggaaactcaaaaagctagagtgccttttttcttccaaacaactgcatcacctttccagcaaggtttctgcaccatgcagagatggcagaaataacagaaatagaactcaaaatgtggataaggacaaagttcattgagctatgggagtatgttgaaacccaatccaagaaagataacaaacacataaaacaatgggattatgtaaagaggccaaatctatgattcactggtgtccctgaaagagagtgaaaccaatttggaaaatatatttttgcatattatccatgagaacttccccaacctagctagagaggccaacattcaaattcaggaaatgcagagaaccccagtaagatacttcacaagaagatcatacccaagccacataatcatcagattctccaaggtcaaaatgaaagaaaaaatgttaaaggaagctagagagaaaggtcaggtcacctacaaaggaaagcccataagagcagacatctcagcagaaagcctacaagctagaagagattgagggccaatatttaacattcttaaagaaaagaaattccaacccacaatttcatagttggccaaagtaagcttcataagcgaaagagaaataagatccttttcagagaagcaaatgctgagggaattcattaccatcagacctgcagtacaagagctcctgaagaaagcattaaatatggaaagaccattaccaaccactacaaaaacacactaaaggacatagatcagttacactataccacctaacaccatgataacggatcaaatccacacatatcaatattaaccttaaatgtaaatgggcagccagctggatgcagtggctcatgcctgtaaccccagcactttgggaggtggaggtgggtggatcatgacattaggagtttcagaccagcctggccaacatggtgaaaccccatctctactaaaaacacaaaaattagctgggcatggtggtgcatgcctatagtcctagctactcaggaggctgaggcaggagaatcgcttcagccccagaggcggaggctgcagtcagctgagattatgccattgcactccagcctgggcaacagagcaagactctgtctcaggaaaaaaaaaaaaaaaagtaaatggcctaaatgccccaattaagagacagactggcaaggtgggtaaagaaccaaaacccactggtatgctgtctccaagagacccatctcacaagcagtgacacacataggcttaaaataaagaaatggacaaaaatccaagtctttgctattgtgaatagtgccacaataaatatacgtgtgcatgtgtctttagagcagcatgatttataatcctttgggtatatacccagtaataggatggctgggtcaaatggtatttctagttatagatccctgaggaatcgccacaccgacttccacaatggttgaactagtttacagtcccaccaacagtgtaaaagtgttcctatttctccacatcctctccagcacctgttgtttcctgactttttaatgatcgccattctaactggtgtgagatggtatctcattgtggttttgattagcatttctctgatggccagtgatgatgagcattttttcatgtgtctgttggctgcataaatgtcttcttttgagaagtgtctgttcatatccttcgcccactttttgatggggttgtctttttcttgtaaatttgtttgagttcattgtagattctggatattagccctttatcagatgagtaggttgcaaaaattttctcccattctgtaggttgtctattcactctgatggtttcttttgctttgcagaagctccttagtttcattagatcccatttgtcaattttggcttttgttgccattgcttttggtgttttagtcatgaagtccttgcccatgcctatgtcctgaatggtattgcctaggttttcttctagggtttttatggttttaggtctagcatgtaagtctttaatccatcttgaattaatttttgtataaggtgtaaggaagggatccagtttcagctttctacatatggctagccagttttcccaacacaaatgtccaacaatgatagactcgattaagaaaacgtggcacatatacaccatggaatactatgcagccataaaaaatgatgagttcatgtcctttgtagggacatggatgaagctggaaaccatcattctcagcaaactattgcaaggacaaaaaaccaaacaccgcatgttctcactcataggtgggaattgaagaatgagaacacatgaacacaggaaggggaacatcacacacccggaactgttgtggggtggggggagggagggatagcattaggagatacacctaatgctaaatgatgagttgatgggtgcagcacaccaacatggcacatgtatacatatgtcacaaacctgcatgttgtgcacgtgtaccctaaaacttaaagtataataataaaaaaaagagaaaaaaaacctgcttattaggaaagcagagtaattatagaatgtaaaattagtgaaaaaatttatgaaattttgcctttataatgatatttaaaataaataccatcatgcctcttttgcaggtaaagaaaatgaaaaactagaatatttaggctcagggtggggtaactttaaaaaagaaggactggtcatgtctatacaatacaatatccttcctcccctaataaactaactcctaaaataaaaaaataaaaaataaataaatggacaaaaatctaccaagaaaatggaaaacagaaaaaaagcagggggccaggtgcaatggctcatggctataatcccaggactttgggagaccgaggcaggaggatcacttgaggccaggagttcaagaccagcttggccaacatggtgaaatgctgtctctactaaaaatacaaaaaattagctgggcatgggggcttgtgcctgtaatcccagctactagggaagctgatgcaggagaattacttgcacaccggaggtggaggttgcagtgaactgagattgcaccactggtctccagcctgggcaacagagcaagactccaactcaaaaagaaaaaaaggaaagaaaaagaaaaaaaaaagcaggggttgcaattctagtttctaacaaaacagactttaaaccaacaaagattctaaaaagacaaggaagggcattacataatggtaaagggttcaatttgacaagaagagctaactatcctgaatacatatgtacgcaacacaggagcaccctgtattcctaatgcaggaacttgctcaaaatgcaggttcttagagactttcaaagagacttacactcccacataataacagtgggagactttaacaccccactggcaatatcagacagatcattcacacagaaaattaacaaaaatattcaggacttgaattcagcactggatcaaatggacctgacagacatctacggaactctctactcaaaaacaatagtatatacattctccccattgtcacatggcacacactcctttttttttttttttttttttttttgagatggagtctcactctgtcccccaggctggagtgcagtggcacgatctcggctcactgcaacctccgcctcccaggtacaagcaattctctgcctcagcctccaaagtagctgggattacaggcacctgccatgatgcccggctaatttttgttatttttagtagagatggggtttcaccatcttggccaaactgctcttgaacttctgacctcatgattcacccacctcagcctcccaaagtgctgggattacaggcgtgagccacggcacctggccggcacacactcttaaatagatcacataattgaaagtaaaatactcctcagcaaatgcaaaataactgaaatcataacaacctctttgatcatagtgcaatcaagtcagaaatcaagactaagaaattcgttcaaaaccatatattacacagaaattgaatcacttgctccagaatgacttttacctctataattgacaattcttgtctcccatcttgctctttcttcttaaatttccttggctattccctccaagatgatgttggataagaggagactagaagctccttagtgtcatttctgactttagtgtgactttctgtaacatgtcccagatgtttgtcaatttgatgaagatatatcacttcctagttcactatttttaggtaacattatttcctgttaaatactgccaattttttttgcatttatgaatgtgggcaccttatttttctctcaacatagagagaccccatctctacaaaaaaatacaaaaatcagccaggcatggtggcacatgcctttggtcccagctattcaggagactgagatgagaggatcatgtgaacctgggagagggaggttgcagtgagtgagtcaagatcatgaacgctgcactccagcctgggtgacagaatgagaccctgcatgaaaaaaaaagactgcatggcattggtggggagtgatatatatatccatggaacagaatagagaatgcacaaatattttcctttcaactgatatttgataaagataccaaagcaggccaggtatggtggctcacgcctgtaatcccagcactttgggaggccgaggcaggcagatcacgaggtcaagaaattgagaccatcctggccaatgtggtgaaaccccgtctctactaaaaatacaaaaattagctgggtgtggtgacacgtgcctgcaatcccagttactcgggaggctgaggcaggagaatcacttgaacccaggagacggaggttgcagtgagccgagatcatgccactgcactccagccaggcggcagtgagactccatctcaaaaaaaaaattaaaaaaaaaaaagataccaaagcaattgaaagcaggactttcaaataatggtgctggaccaaatgaatatccacaatgaaaaaagatcaatctgcacctaaatttgacactcattcaaaaaggaccatgttgtgaaatgcaaaataaagaaaccatcaaatgttaatctatcaagaattagaaaaacatactgtaaactaattgggaacaagcacaccaaagagttcatagatatgacaccaaaagcatggaaaaaaatgataaatgaaacttcgtcaagttaaaacttctggtctgtgataccaatggaacagaacagagaacccagaaataaggccacaaacctgcaactatctgatcttcgatgaagctgacaaaaacaagcaatggagataacactctctacttaataaatgatgctgggataactggctagccacatgtagaagactgaagctggacctcttccttataccacacaaaaaattaagtcaagatgaatcaaagacttaaatgagaaatcccaaactataaaacacatggaagataatctaggcaataccatcctggacatacaaatggacaaagatttcataacgaagacaccaaaagcaattacaacaaaagcaaaaattgacaaatgggatctaattacaccaaagagcttccacatagcaaaagaaactatcgcaatgaatagaaaaccgtacagaatgtgagaaacttttgtgcaaactatgcacctgacgagtctaatatccagcatctatgaggaacttacacaaaattataagaataaaacaaccccattaaaaagtgggcaaaggacatgaacatttttcaaaagaagacatatggcccagctcaatggctcaaacctataatcccagcactttgggaggccaatcctggtggatcacctgaggtcaggagttccagaccagcttggccaacatggtgaaaccccgtctctactaaaaatacaaaaattagccacgcgtggtggctcacgcctgtaatcccagccactcgggaggaagaggcaggagaattgcttgaacccgagagaggcggtggttgcagtgagccaagatcgtgccactgcactccagcctgggcaacagagtgagactatgtctccaaaaaaaaaaaagacagaaaaaagaaacaacccagagcacaggaaaagggaagacgcctgtgtggctggaacagacggagtgagcgctcactagcaggagataaggtcagagatgtcctggggaagcagatcagatagggacaaggtcttcaaacaactctctcccacaccacaaaagaaattggaaatgatttatttcctcacctgttttaagtaaacatttaacttttttctttctcgtagaagagaaagtgatcaactgtaccacatactaccaaaaggaagagaaagatgaggacaggaagttaaatattgcatttaaaaatggggaggttctctgggcgcagtggctcacatctgtaatcccagctctcagggaggcagaggcgagaggatagctagagcccaggagttcgagacccgcctgggcaatatagcaagaccccgttgttctccacaaaaagcaaaaaaaaaaaaaagacaaaaaaaagtgtaggccaggtgtggcgactcacgcttgtaatcccagcactttgggaggccaaggcgggcagatcatgaggtcaagagatcgagaccgtcctggcaaacatggtgaaaccccacctctactgaaaatacaaaaattagttgggcgtggtgcgcgtgcctgtagttccagctactcaggaggctgaggcaggagaattgcttgaacctgggaggcggaggttgcagtgaaccgagatgcaccactgcactcccgcctgcgcgacagagcaactctcaaaaaacaaaaaaaaaaaagtgtaaaaatggggaggttggctgggctcagtgactcacacctgtaatcccagtactttgggaggccaaagtgggcaaatcacaatcaccttaggtcaggagtttgagaccagcctggctaacatggtgaagccccgcctctactaaaaatacaaaaattagctgggtgtggtggtgcatgcctgtaatcccagctactcaggaggctgacgctggagaattgcttgaatccgggaggcggagtttgcagtgagcagagatcatgccactgcactccagcctggatgacagagtgagactccgtctcaaaaaaaaaaaaaaaaaagaaagaaagaaatgggaagtcactgatgattgaaaaagaagggatcagttgaatgctggaagtgaatgtttgattcaagcaagaattcaagggttcaagtaaaagttggaggcaagacttgaagagaaagtaaaagcaagctttcagagtatgacattctttctttctttcttttcttttttttttttttttgagatggagttttactcttgttgcccaggctggagtgcaatggtgcaatctcagctcactgcaacctccacctcccaggttcaagcaattctcccgcctcagcctcccaatagctgtgattacaggcatgtgccaccacgcctggcaaatttttgtatttttagtagacacagggtttcaccatgttggccagtctggtttcaaactcctgatctcaggtgatccacccgccttagcctcccaaagtgctgagattacaggcgtaaaccactgtgcctggccacgagtatgacattctcaaaggggctcagaagaggggaattaccatagagggaaatatagttaccactaatttttgttttaaagatggtgaagggggcctgcccctccacacctgtgggtatttctcgcaaggtggagatgagagactgagaaaagaaataagacacggagccttgggcccaggggaccggcgctcagcatacgaaggacccgcaccggcactggtctctgagttccctcagtatttattgatcactatctctactatctcagcaagggggatgtggcaggactataaggtaatggtggggagagggtcagcaggaaaacatgtgagcaaaggactctgtgtcataaataagtttaaggaaaggtgctgtgcctcaatgtgcatgtagaccagatttatgtttgactttacacaagcatctcagtgcagtaaagagcagtattgcccccagcatgtctcacctccagccataaggcagttttctcctatctcagcaaatagaatgtatgatcaggttttacaccgagacattccattcccagggatgagcaggagacagatgctttcctcttatctcaactgcaaagaggccgtcctctttcactaatcctcctcagcacataccctttacgggtgttgggctgggggatggtcaggtctttcccttcccatgaggccatatctcaggctatgtcagtgggggggaaaccttggacaatgcccaggctttctcaggcagaggtccctgcggccttccgcagtgcattgtgtccccgggtactcgagactggagaatggtgatgacttttaccaagcatactgcctgcaaacacattttaacaaagcacatcctgcacagccctaaatccattaaatcttgagtcaacacagcatatgtttctgcgagcacagggttggagctagggttacagattaacagcatctcaaggcagaagaatttttcttagaacagatcaaaatggagtttcttatgttttcctttttctacatagacaaagtaacagtctgacctatctttcttcccccaacaagatgggcgagcagaagggaaaaaatggctttattctgtatgtgtgcatgtgtgtttatgtgtcttttaaaggagaagaccatcattggagtatgctgatgaaaataattcccttgagcctggcgcggtggctcatgcctgtaatcccagcactttgggaggccaaggcaggtggatcacgaggtcaggagttcgagaccaggctgaccaacatggtgaaactccatctctactaaaaatacaaaaattagccgggcttggtggcacgtgcctgtaatctcagctactcaggaggctggggcaggagaatcgcttgaacccgggaggtggaggttgcagtgagctgagatcgtgccactgcactccagcctgggcaactgagcaagactccatctcaaaaaaaaaaaaaaaatcagagcttagtcttcacttgtgaaatagatttgtgaagggagcacctgcatccttggagagctctgtgattgatcttctctgtatgccagatcttacaatgggaaccagtcactcaattgaaaaacttaaatgcagtgggaataactggatcttaaggaggtagggaccaactagcgagacttatggcccctcaatttccagacttgagccagtttacagacccaggatcccttgaatgaaagggaagctggatttccttaagaaaagatctcactgcacgacaatttatactgtcaatctttctcccatcctttgccaaggagaccgctggccttttaccagggtaaatatgcattgaggaaagtggaatgatcagaccttttggggactagtggacccggctctgagctaacattgattccaggggacccaaaacatcattttggtcctcagttacagtaggggtttatgggagatcagataattaatggagttttagctcaggtctgatttacagtgagtccagtgtgtccccagactcatcctgtggtcatttccccggtgccaaaatgcataaatggaatagacatacttagcagcaggcagaatccccgcattagcttgctgactagtagagtgagggctattatggtgggaaaggccaaacggaagccactagagctgcctccatctagaagaattgcaaataaaaaacatcacaggccaggtacagtggctcacacctataatcccatcactttgggaggttgaggctggtggatcacgaggtcaggagtttaagaccagcctgaccaatatggtgaaactccgtatctactaaaaatataaaaatacaggctgggcgcggtggctcacgcatgtaatcccagcactttgggaggccaaggtggtcagatcacgagatcaggagttggagaccagctccaacagtaaaaccccatctctactaaaaatacaaaaattagctgggcatggtgtcatgtgcctgtgatcccagctgctcaaaaggcagaggcaggagaatcgcttgaatctgggaggtcaaagttggagtgagctgagacggcgccaatgcattccagcctcggcgacagagcaagactccgtctcaaaaaaaaaaaaaaagacaaaaaaaccccacaaaagttagctgggcgtggtggcgcacacctgtagtcccaactacttgggaggctgaggcaggagaatcgcttgaacccaggaggtggaggttgcagtgagctgagatcgcgctgcactccagcctgggcgttaaagcaagactccatctcaaaaacgaacaaaaacaacaacatcatgtctctggacttgaaagatccaggggtggtgattcccaccacatctccactcagctctcttatttggcctgtgcagaaggcaggtggatcttggagaatgacagtggattatcataagctcaaccaagtggtgcctccaatggcagctgctgtaccagatgtggtttcactgctcgagcacattaccacatctcctggtaactggtatgcagccactgatttggctaactgcttttttttccttccattcctgtccataaggcccactagaaggaatctgccttcagctggcaagaccagcaatataccttccctgtcctgccttggaggaatacgggctctccagctttatgtcataatcttgctcacagagatcttgatcagttcgctttcataagatatcacactgctcctttacattgatgacgttatgctgagtgggcccagtgagcaacaagtagcaaccacactgaatttattggtgagacatttgtatgccaggggatgagaaataaatctgggtaaaattcaggattctttcgcctcagtgaaatttctaggggtccggtggtgtggggccggtcaagatatttttcttttctttttttttttttttaaatggagttttgctcttgttgcccaggctggagtgcaatgactcgatctcggctcactgcaacctctgcctcccaggttcaagcaattctcctgcctcagcctcctgagtagctgggattacaggcattcgccaccatacccggctaactttttgtatttttagtagagacggggtttcaccatgttggtcagactggccttgaactcctgacttcaggtgatccgcccgcctcggcctcccaaagtgctgggattacaggcatgagccactgcgtccggccaagatcttccttctaaggtgaacgataagttgctgcatttggcccttcctacaacaaagaaagaggcataacgcctagtgggcctgtttggatttggagacaacacatttctcatttgggtgtgttactccagcccatttatcaagtgatccaaaaggctgccaatgttgagtgtggtccagaacagaagactccacaacagctccaagctgttgtgcaagctgctctgccactgggccatatgacccagcagatccaatggtacttgaagtgtcagtggcagataggcatgctgtttggagcctttgtcaggcccctaaaggtgaatcatagtggggcctctgggattttggagcaagggcctaccatcctctgcagataactactcaccttttgaaagacagctcccagcctgttgctgggccttggtagaaactgaatatttgactatgggtcaccaagttacaatgagacctgatctgcctatcatgaactgggtattttctgattcatggagccataaagctgtgcatgcccagcagcattccatcatcaaatggaaatggtatatatgtgattgggctcaagcagttcctgaaggcacaaggaagttacatgagaaagtggctcaaatggccaggcatggtggctcacacctacaatcccagcactttgggaggccaaggtgggcggattgcttgaggtcaggggttcgagaccagcttggtcaacaaggcaaaaccccatctctactaaaaatacaaaaattagccgggtgtggtggtgcatgcctgtaatcccagctactcaggaggctgaggcaggagaatcgcttgaacccgggaggtggaggttgcagtgaactgagattgtgccactgcactccagcctgggtgacagaatgagactccatctcaaaaaaaaaaaaaaaaaaaaaagagaaagtggctcaaatgcctatggtctctactcctgccatcctgccttctctccctcagcctgcatcaacatcctcatggggagttccctatgatcagttaacagagcaaaagaagactagggcccagtttacagatggttctgcatgatatgcagttaccacctgaaagtagacagctgcagcaccttctaggacatccctgaagaatagtggtgaagggaaatcttcccagtgggcagaactttgagcagcacagctggttgtgcacttcggtttgaaggagaaatggccagatgtgtgattctatactgactcatgagttgtagctaatggtttggctggatggtcagggacttggaagaagcatgattggaaaattggtggcagaaaaatctggagaacttccatccaaatgttgatggacccgagtggtcaaaaacagtgaagatatttgtgtcccacatgaatgttcaccaaaggatgacctcagcagaggaggattttaataatgaaatggataggataactcattctgtggataccactcagcctctttccccagccactcctgtcatcacccaatgggctcatgaacaaagtggccatggtagcagggatggaggttacacatgggctcagcaatatggacttccattcaccaaggctgacctggctatggccaccgctgagtgcccaatttgccaggagcagagaccaacactgagccctcaatatggcaccattccttgggagtgatcagccaggtacttggtggcaggtcttccatcatggaaagggcagcagtttgtccttgctggaatagacacttaggccagatatggatttgcctttcctgtgattctcccacctcggtctcccaagtagtagctgagattataggcgtgcattaccacgcccagctaatttttgttttttctctgtttttttgagacggattctcgctctgtcacccaggctggagtgcagtggtgtgatctcagctcactgcaagctccacctcctgggatgacaccattctcctgcctcagcctcccgagtagctgggactacaggtgcccaccaccacgcctggctaattttttgtatttttagtagagatggggtttcaccgtgttagccagatggtctcgatctcctgatcttgtgatctgcccgcctcggcctcccaaagtgctgaatttttgtattttcagtagagatggggtttcaccatgttggcaaggctgatcttgaactcctgaccccaggtgatccgcccgcctcggccttccaaagtgctgggattacaggtgtgagccacagcgcccagctgactgctgaacttttttttttttttttttgaaatggagttcacctttgttgcccaggttggagtgcagtggcacgatctcggctcaccacaacctctgcctcccaggttcaagtgattctcctgcctcagcctcccaagtagctgggattacaggcatgcaccaccacacctggctaattttgtatttttagtagagaaggggtttctccatgttggtcaggctggtctcgaactcccgacctcaggtgatctgctcactttggcctcccaaagtgctgggaataatgagccaccaagcccagccccaagaaaaaaagttttttttttcaaagctgaagcctggaagaacatataggtgactaaaaattagacaaaaagaaaaaaaaaaaaacagaaaaaaagtcaatgtagtacaccgcactgacaaagtgaaggacaaaaatcacgtgatcagctcaattgatgcataaaaagtatttgagaaaatccaatactgttcatgattttaaaaaaccatttaaactagaaagagaagaaaataccagaacatgagatttagctgtgatttcttggatacaatatgaaaagcactggcagaaaagcaaaaacagatgaaaggaactacatctaaatgaaaaacttctgtgcatcaaaagagaatgctccagcaaggatgtagaagagcgagctcctgtttcccaacacaaaagtaaaatctcaaaacttgcaggttaaaatatcacaataaaacattcactgaaaaacatgttttaaatctcatatcgatgtataaatacgttactataaatcttgtgctgactcttgccatgaactgagaatggtggttctccactgagcacgaggaaggaagcggaacagaaaagacgatgtgttacatcttagtgcctaagctataagtttggagttttactataaaacattcaccatgtgatgttcaaaataaaatagaatatttaataattattgggttaaaaaaatggttcaattctctccaatggcaaagaagctgtgattcactgtatgagcacagtgataaccattctcacctaaaacacagttcacaggggttcctccaggaatacaacatctctgttctggtctgtctgaaaatagtttaatgtatctcctgctgtttgacatttatgttgacttcatatattaaaatgtgaggaatgaaaaaatcctatcactgatgtttccatctaaactttccattccattcccagtcattaagagtttgaactcagaaacacagtgactcacttgttcagttccaaatataataaaaacgaggcaggaaagatttccccatagtgttctcattttaaagcattcaacaggaacttgtgcatattaatacctgacgtcatgggcaacttcttgaatcctggtctacaaagaggtggcatacatccaaatgtggctcctaaacaatccctgctccccagaagcactgaaaccacaaggcccacaccccatctccaatccatgtctgggtgtcagcccttccaaggaccatgcccagcagagcctcttcagaagttcatgtcactaggtcatgcaggatggaatctaagtgagatgagagggactgagggaaggcatgcgtgagtgagcaaacatgtcaggcaggatgtttcaaagatttgcaatgacattttgttacagtaggtagcttacctggtatgagaaggagagggctccccctccccattcacacacatcaggaatgagccaggcaaccatcaggtgatggtcaggtggttgttaactgtctctctaaaataataattagtcacagccggcaccagggaaaggcatagatagaaaacacctgaaactggtgatcagcctcttcccatgagatctcaggagttgggcgagtggactaaagcatgtgcatgtggacagcccaccccaaggcaagaacagcccaccccaaggaagcaagaccccggaagtatgccaacgtataaaaccctaagtcaaaaggtcaaactgcacacttgcctttcaagtcgatcacttggccctcttccaagtgtactttccttcctttcagttctgctctaaagctttttctttttttttgagtcaaagtctcactttgtcgcccaggctggagtgcagtggtgtgatctcggctcaccacaacctccacctccagggttcaagtgattctcctgcctcagcctcccgagtagctgggactacaggcgtgcaccagtaggctcggctaatttttgtatttttagtagagacggggtttccccatcttagccaggctggtattgagctcctgacctcaggtgatccgcctgccccggcctccgaaagtgctgagattacaggcatgagccaccacacccagaaaaaaatttaaaatttaatatgtgttatattataaacagagaaatcaatatgtcacaatttaatcaactcatccaatcaacacccccaaccttgttcattattctgtgtttccctcccttattccgtacatatctctcattctcatcttctctaactcttgggttcttttctgtttccccctgggtttctgctcctcattttgagcctctctcctctcttgctgtttctccgcttcttcctgctattccatcttttccacctgttctgctccagtcttacaacttgtttcacctcctgtccctctttctccccaatcactggattgtccccagtgtccatacatttctgcctctgtctttccccatctctgcttcccctgttaaattccctcttccctgtttacacccccttgtcctcagtctctagcaccctcagatccctaggcttacactgaggtctatgatccattctgagttaatttatgcacaaaacgtgaggtttttgtctggatttttttcttttttgcatttggatgtccagttgttccagcaccaaaactcaaacagaaacacacaatctgaacaggcctatagcttttaatgaatttgaaccaataatccctgagcaccctgctgtggttcttcttctgctctccttgtcaccagttgccccttcttgctgtcccagcaccacgctgctgcctgccgtggctccaaatccctcctcctctccctcactctctgtctgaggagcctcccctctgctgcccctctccctaccttgctgtccttcacctttctggacatggagcttttctctacatttctccagttgtttccccatcctgttactttctcagcttcttctttgactcttcctgtctcttcgcgaatcccccacgcatcctccattttgccatctgtttatgggtttccctcattctctgtctcagtttgtctacttctctcgcagtccctgtttccagatccccttggcccacacattcacaggagggtttagggtaagacacctgcatcccgcaggagcacatttttccagggggtggagctgggaaggcaagaacaccaggtgtcacaggacaggccctgggcacctccctaacgcgggctcaggggaagcggggactgcaaacgagaggcctggggagcagcagggcccagcaagagttggagggaggtgggggcgaaggcgccttaggataggggtggggtctgcaggatcccgccaggcagaggacgcagcctccctgggactggggctgcggggccgacgagggcgaggctgggaggcgcccaggacgcgactccacctcgcgggtgaggacttgaaaaagtgcggggcaggatgaggggtcagtacagggtttcgaacggaaaaatttaaggaaagaacatgtctacatgacctgaaggcagaaacaccggcgacggaaccagcctcagaatgattttaccccaaatcactgaaacgaccccaagagtctcatagcgatgtgtgacttactagcagtgaggggagcggtatgagaattttcaggcgtgtacgaacctccaaatccggggtatggaggtgagaggactgcgaagcccaagtttaatcttaataatagacagagggaaatccacgcgccgccataccaggttcactccgcgcgatctgtttccgggtctgcaggaaactaagcgcagagcggaatcctgggcgggtcccgcgagcgacggcgtcgggagggaagaaggaagggggcggggcctccgcggagtgggggggcctatgctttcctcttctggctcccatggcatctctatttttcgggtttaggaggcaacatttaccagtgaggctgaagcaactcagcaggatctccctggggcagggcaaaccgttggtgattggatccaggaaaattcctgctattgaaaaagtttagcaacttaatttaaaagccccagaattgtctgtgaaggggatgcaaactggaacgtgaaaggcaaactctgcatggggggatggatcaatcccatgctgatgtcccacaaaacaaaatagaaatccttttattttttatttatttatttttttgagactgagtcttgctctgtcacccaggctggagtgcagtggtgcgatctcggctcactgcaagctctgcctcctgggttcacgccattttcctgcctcagcctcccaagtagctggaactacaggcgcccgccaccacacccggctaatgttttgtatttttagtagagatggggtttcaccgtgttagacaggatggtctcgatctcctgacctcgtgatctgcctgcctcagcctcccaaagtgctgggattacaggcgtgatccaccgcacctggccctagaaatccttttattttctaatctccatttactccagagagtcaaccttgtacttgtttccaaagactgactttgttttttttttttttttggaaacgtagtttcaaatctgtcagccttggcttcccaaagtgctgggattacaggcgtgagccactgggcctggcctccagagactttcatagacgcaacacctggggtgttaagcatggaaagctaggtctgtcatcaccctggattcatcttgtctctgcccagaagagacagtgcactgaaaacaggagagttttgcagcaaagagtttaattatcgcagggctagccaagtggaacaagttgggagagggggaagttagttctcaaatctgtcgcccgaaaagttgggagactagggttttgaggataattcggagagcaaggggctagggaattggtgtggctcattagttgtggagaaaatcataagagggttcaaaacaggcctcctggagctgagtcagtttctgggtgacggtcacaggaccgggcagtgccagttctctggtaccagtgaagaagacgtccaggtggcctgaatgactctgcccaattgtaaaagtctgaaaaatacctcaaagaccaatcttaggttttcacaatagtagtgttatctacaggagcaactgagaaattacaaatcactggttattgtttctgtctacattttagcagaattcagttacctcccataatcctaacatttagcctttcattagtcttagaaagttggtttcagtcacctgagagggtcactttgggagggactagtatcatcctttcttcaaagtcataactataaactgaattccacccatagttagctgggccaatgcccagtaatgagcaaacacagcttgtgaggttagaagcaacaattaggttagatttctctcactatcatgatttttgcaaaggtggtttcaggttcagtgatgttagatcaccgatttttgctttaaataataagcaatggccgggtgcagtggctcatgcctgtaatcccagcactttgggaggctgaggcaggtgggtcacctgaagtcaggagttcaagaccagcctggccaacatggcaaaaccctgtctctactaaaaatacaaaaagtagccgggtgtggtggtgcatgcctgtaatctcagctacttgggaggctgaggcagaagaatcacttgaacctgggaggcggaggttgcagtgagccaaggttgtgacattgtactccagccttggcgacaagatcgaaacttccttgaagaaaaacaaaacaaaacaaaaacctaaaacatctgatgggagaaagaacgcacaaataataacacaaaacccccaaacaatatgattactgagtgctctaatggtaaggagaaatttaaaccagctggttattaatcttaactttagccaagacagaaccccaaattcacctacatacctaggaatgggtataccatcctaggaggaggaaaaaaactgaaattcaccttcccaattggaagcgagcttaaactttagaaaggagttacctgccttctactgtcatggaagcaggaaaacgtgccttccttattggaagcaagtaaaactccagaaaaagatgtacagcaaaataaagttaagatctcaaccaaattttgatagatcagggattctctagagagggagctcccaggcctcagccaattgtcctactggtttgagccataaggatagctcaatctggtaccaagcaccaataggagatcgtcaaaggtcagggcccactctactcagagttacttccttgggtcaccaatttgtcaacgaagagtacctgagacaggtctcaatcaatttagaaagtttatattgccaaggttaacaacatgcctgtgacacagcctcaggaaatcctgatgacatgtgcccaaggtagtctaagtacagtttggttttacacattttagggagacatgagacattaatcaatatatgaaagatgtgggccaggcgcagtggctcatgcctgtgatcccaacaatttggaggccaaggtgggcggatcacaacgtcaggagttggagaccagcctggccaacatggtgaaagcctgtctgtactaaaaatacaaaaattagcctggtgtggtggcacgtgtctgtaatctcagctactcgggaggctgaggcaggagaattgcttgaacctgagaggtggaggttgcagtgagctgagatagggccattgcactccagcctgggcgacagagtgagactctgtctcaaatttaaaaaataaaataaaatagaaatatatgaaagatgtccatcgacttggtctggaaagtcacacaactcaatcagggaggaagcttctaggtcataggtagataacagacaaactgttgcattcttttggagtttcagattaggctttcactgaattcgtgatttacaggaatagtcacttatgccttagtctggcttagtgaaacaataggacaaaggaaaaaatcagatacgcatttgtctcatgtgagcagagggatgacactgagttctgtctgtcctttgtccacaaggaatttccttgtaggtaaattttgaggaaggtatgtagcttttaaaaatctttgtagctatcttatttaggaataaggaataaaatgggaggcatatttgcctgacagagttcccagcttgacttttcccttggctaagtgattttggggtctgagatttattttcctattacacctccttgtaatatcattataagagaaatgcaaattaatatggatttttttcaaataagttaaagtaggaactactttgtgtgtgtgtgtgtatgtgtgtgtgacagaatctcattctgtcacccagactggagtgcaatggcatgatcattgctcattgcagcctcaggtgatcctcccacctcagcctcctggtagctgagactacaggcatgtaccatcatgcctggctaatttttgtattgcttgtaaagacaggattttgccatgttgcccaggccagtcgcaaactcctggtctcaagtgatcctcccacctcagcctgccaaaatgccaggattacaggcatgaaccacttagcccatccaggaagtactttcatctcttgagtatatattatagcctgtgtcacacacaaaaaagagaatgtacatattctaacacagatggaacaatgaaaatgtttactactgtcaaagaacaaatttggacattggttagaagagattctattcaaaaagtatattgtggtagggagaatgctccaaccacaagatctgcaaatgtttgagtcacaagaaatgggcttttcttttctctaaagaaggaagcaaggctagaaagcaccaggtacagggcaggggatgagcatctgctgtgacctattcagggaattttttttttttttttttttttgagacagaatctcattctgttgcccaggctggagtgcagtggtgcaatctcggctcactgcaagctccgcctcctgggttcacgccatcctcctgcctcagcctcccgagtagctgggactacaggcgcatgccaccacgcccagctaattttttgtatttgtagtagagacagggtttcaccgtgttagccaggatggtttcgatctcctgacctcgtgatctgcccgcctcagcctcccaaagtgctgggattacaggcgtgagccaccacgcccggcccaaacaaagattttaaaaaataataaatacatgtgttctacttgaaaaacagaactaaaagtaataagaacaatagcaaactttgctccttacctcagtttttgaatgacattgaagggtcctcaatgtgcatttcggctgtgtggtattcatttcgatcacatgcaagacactgatcagttcttgttggaagatatggctctacatttctaacttcaagggtctctgtaactgtcgaattaagcagaaagctagggtcatattaagaaaaatagtgttcccttatacatttttctgctgatcatgggaaaacatattctcacagcttcatgaattatttggtcacaatttgacaataaaaacactaatttatatgtcagatccatgtcacattctcatattaatctaaattttcttttttttttttttgagacagagtcttgctgcattgcccaggctggagtgcagtggcgcgatctcggctcactgcaagctccgcctcccaggttcacgccattctcctgcctcagcctcccgagtagctgggactacaggcgcctgccacctcgcccggctaattttttgtatatttagtagagacagggtttcaccgtgttagccaggatggtctcgatctcctgacctcgtgatccacccacattggcctcccaaagtgctgggattacaggcatgcgcccgacctcaatctaaattttcttgacatcctttttggtaccagctgagccctgacaaaggaaggtaattcagagacattttctcttgtgatcagagaaataacctaatgagaataaacttatgttgattgggtttttttgttttttgtttgtttttgagacagggtctcactctgtcccctaggctggagtgcagtggcatgatcacagctcactgtaccctccacctcctgggctcaagccatcctcccagctcagcctcctcaatagctgggactagagggtcacgacactatgcccagctaatttttttgtattttttgtagacatagggttttgtcacgttgcccaggctggtcccaaacttctgaactcaagtgatccgcctgtgtcagcctcccagtgtgttgggattacaggtgtgcaccaccatgcccagctgaaaataaaattaaggtgaagaaagttgttctctgtgatctcaggggaaaaccttcaggtaaatttgcattcagattgaatagaagaaacatacaaatgtggatgaactagatactactttaaaagtctttctagcgccaggctcagtggctcatgcctgtaatcccatcactttaggaggctgaggcaggcagatcatgaggtcaggagatcaaggccatcctggccaaagtggtgaaaccccatctctactaaaaatacaaaaactagctgggcgtggtggcatgtggctataatcccagctactcgggagggtgaggcaggagaatcgcttgaaccagggagctggaggttgcagtgagccgagatcacgccactgcactccagcctgggtgacagagtgagacacctttacaaaaaataaataaataaagtatttctgtccacaaaccagcttggagtaggtaggtagccaggcatgagcagttaaaggagcccctgggaaaggaatcttaagaaacacagcccactgacaatccccttttgacagcaaaagcaggacagtggctacattgcctacacctgtccttgtggctggacttgtctggcccaggaagggagttatctggccctagccagaaataacccagctaggggattttccctattaaggagcgtgcacactcctctaataattcatcctagaatggccttttgctcattataatactaagaaacacatccccttttttcaaatatgattttagaaaaaaataaataagggctgggtgcggtggctcatgcctgtaatcccagcactttgggaggccgaggcaggtggatcacgaggtcaggagatccagaccatcctggctaacacggtgaaatcccgtctctactaaaaatacaaaaaaaaaattagctgggcgtggtggcaggcacctgtggtcccagctactcaggaggctgaggcaggagaatggcgtgaacccgggaggcggagcttgcagtgagccgagatagcgccaccgcactccagcctgggcgacagagtgagactccgtctcaaaaaaaaaaaaaaaaaagccacacccctgggtggagatttgagatgctaaggagatatgtgatgtgtgcatggacagtcacagcacattcctgcccaaatgacttcccagaacatgcttactaataatggctgtgcacggccccttcatgaataatcatgtcaggttctcattaaaagggtcaggccagcataagtaaggacagactccttcttttcaggagcccactcggttctgtcgttcagggtgtcgcttctttctgagctcctgtctctttaaatgaagggcatttaccctttaactctttctgcgcatctcttgactgaatccaagaagaccaagaaccagaggacttccacacccctctgggtaacatctggtgttttcacctggttacctggttacctcgcctggttatccaggtaagtaccaaaaagctggtgccagattctctggttgacgacctctgcttctttctgcactgaagaacctcctgccctaatgcagatctggcagctttaaggggaggggtttttcctctcaggctctgttcactaacgactgcccagtaccatttcccttcagccactgtcactctgctccctctggctgatttctcagctcaccctgaggggtgataagcagaggagggaggatttaaactccacagtgagtagatctgagacacatggtgacccttcttgcaggaggcttgtgaaggtggcagggaatacgcctggctgtgcagtgactggggagcttcatatttttttttgtgggggggaggacagagtctcactctgtcgcccaggctggagcgcagtggtgtgatctcggctcactgcaacctccacctcccgggttcaagcgattcttctgcctcagcctcccgagtagcagggactacaggcgtgtgccaccatgcccggctaatttttgtatttttagtagagacagagtttcaccatattggccaggctggtctcgaactcctgacctcgtgatccgcccacctcggcctcccaaactgctgggattacgggcgtgagccactgcgaccggcgcatatcttttaattaaaactacaatccggtgttaagtcagctcttatacttgccattcatggccgttcactcccctgaacaccatatgcccccaccgttgattaatctcccaggtcactctgcttactctttgctgtccctctcctcgccgcagggatttcatgaattcttcctgcgggtgcaagcctcttgcagggcctgtttatccaggacctgctgcgtttgcttcactcaggcgccagagtcctttgagggcctatgctgatgtttatacttttttcctcagaaatgagactcagctttgtcctttcccttgcctcctgtttcactggagggaccggcactgggaggatgcctgcttaaagaaatccctcattttggccgggcacggtggctcatgcctgtaatctcagcactctgagaggttgaggggggtggatcacctgagggcaggagttcaagaccagcctggccaacatggtgaaaccccatctctactaaatatacaaaaattagccgggcgtggtggcacacgcttgtaatcccagctacttgggaggctgaggcaggagaatcgcttgaacccgggagctggccattgcagtgggccgagatcgcaccattgcactccagcctgggcaacaagagcgaaactctgtctgaaaaaaaaaaagaaagaaagaaatccctcacttattattgggtccttctccgcctgcctactcttcaagaatgcctcattctgtgactcctcaatggaactgcctggctcttccagagggtcacctgtgaccacttccttactccctagtttctctgtacaaccagggtttccaatgggccacaggagactgctttctccacctcattaggccattgtaacagacccgtgaagtactcaggtcctttttgctttttgttgaataagctgatagaaaatgcttctcacattccccttgctgtttatgtgatcatataatggactaaaaaaccagaatcaacagcccagttcactaactctgagccccagggggtcttctatgcttttcaagcatttttttctgtataaaccccaaggaaccttttaagagtgggggaagatatcacatcttttccgttcctgtaatcattagtattagcccaatatcattatgtattaagaagacctaggctgggcgcattggctcacgtttgtaatcccagcactttcggaggccaaggcgggcgtgtcacccgaggttgtgagttcgagaccagcctgatcaacatggagaaaccccgtatcggctgggcacggtggctgatgcctataatcccagcactttgggaggctgaggcgggcagatcacgaggtcgggagtttgagaccagcctggccaatatggtggaaccctgtctctactaaaaaattagccgggcctggtggcatggatctgttatcccagctattcaggcggctgaggcagaagaatctcttgaaccctggacacagaggttgcagtgagctgagatcgtgccactgcactccagcctgggtgacaaagtgagactccatgtcaaaaaaaaaaagaaaccccgtctctactaaaaatacaaaaatagctgggcatggtggtggacaccagtaatcccagctactcaggaggctgaggcagaagaatcgcttgaacccaggaggcggaggttaccgtgagccaagatagcgccactgcactccagcctgggcaacaagagagaaactgtctcaaaaaaaaggactttagaagtcccttctctgcagaattcagcaggggcacaactactgggcttcctgcagaaccaaggtcactgggaacatgagagaagagaagagaactactctcatggcagacattcttccacccgtccttacccaacacggaagagtggaaggcatcactgctgggcatcaatcccaggaaatctaagaaatccttctgagcaaaacaataggaagaaatgcaaacagcagagcacacagtagggctaattccagagctccaaggtgaaggacacttcacccttgcagggagaggcatgagacacctcatttaggtcaaggattggaatgcctgaccttcatgagtcaccaaataggtaaagggacacttcctctatcctgcattctctcttgtcttgtctttcagatgggtaatcagatctttatatcccaggattcccctcctggatccccttggaatctgggaaaaggttgatccccagattgtaaaacaagagactgattttcctttgcaatatagtttggtcaaaggtggggagcttaaatgttaataccatattccagcttgacctttactgccaacaccaacacaaatggtcagaagtcccttatgtgaaaatcttcatgatctcgtgggaaaaccctgatttttgtaaaggctgcaaaacgggctcaaaagaaaaagaaaaggaaaggaaacagccaagggcggtggctcacgcctgtaatcctagcactttgggaggccaaggtgggctgatcacctgtcaggtaaccaggtggccaggtgaccaggctggtcaggagtttgagaccagcctggccaacatggtgaaaccccatctctactaaaaatacaaaaaaattagccgggcatggtggcggtcacctgtaatctcagctactcgagaggctgaggcaggagaatcacttgaaccccaggaggcggaggttgcagtgagctgagatcgcaccattgcactccagcctgggagacaagagcaatactacatctcaaaaaaacaaacaaaaaaaaggccagccacagtggctcatgcctgtaatcccagtactttgagaggctgaagcaggtagatcatctgaggtcaggagttcaagaccagcctgaccaatgtggagaaaccttgtctactaaaaatacaaaattagctgggcatgctggtacatgcctgtaatcccagctactcgggaggcttaggcaggtgaatcacttgaacctgggaggcggaggttgcggtgagccgagatcccgccattgcactccagcctgggcgacaagagcaaaattccatctcaaaaaaaaaaaaaaaaaaaaaaatacaagccattcaggagtttggacaaaaggtactgcctgctcttgaccctttcaggaatcaacacccattataccaaccagggtcaaaaaacctggagagatgggtcatctgggtctcaactcccttatggaaagacccctttactgtcttactttccaccccaacagctatcaacatttctggcatctccagttggatacatcagtctcaagtgaaactgtgggaaggtcccgaagaaccacagaagaacaacagaattcagcacctgagcattcttgtgagccactggagaacttaaaattccacttcaagtgaaaagataagtaaagccttctctctgttcacccaaaactaaagtcaatctcagtacggggaatcttggttgcggtggcattggttcttctccttattttgacccaactggcatgccacctgaagtcccgataacagcctgatttctcactaaacactccatcgaaccacttcattatttgtctctcctattttcagcactttccttttgctttcacaaagcttaagggagaatcagctatgacagagaaattccttttcctttatctttccctccttcccatgcccctactctcacaggcacagtggaatgaaaattcccttgtcagtttttccaaaataattgcttcgggaaaccatctaagcaactgttggatctgccacaacttcatcaccaggtcctcatcttaccaatatattttggtaagaaatttttctttaaacctaacatttggttcaggaatccctgaaggccaacataaatctgttccgctccaggtttcgcttgctaactcagcgcaccaagtcccctgcctggatctcactccacctttcaatcaaagctctaaaacttctttctatttctacaactgctcttctctaaaccaaacctgttgtccatgccctgaaggacactgtgacaggaagaacacctctgaggagggattccccagtcccaccatccatcccatgagcttctccccagcaggctgccaccctaacttgactcactggtgtccagctaaacaaatgaacgattatcgagacaagtcaccccaaaaccgctgtgcagcttgggaaggaaaagagctaatcacatggagggttctatattcgcttcccaaggcacacactgtccccacatggccaaaatctactgttcccctgggagggcctctatcccctgcatgcaatcaaactattccagcagggtggaaatcgcagttacacaagtggttcgacagccacatcccccggtgggcctgtacccctcctggctatgtatttttatgtgggccacaaaaaaataaactgccctttgatggaagtcctaagataacctattcaaccccccctgtggcaaacctctacacttgcattaataacatccaacatacgggagaatgtgctgtgggacttttgggaccacgggggataggtgtgaccatttataacaccacccaacccagacagaaaagagctctgggtctaatactggcagggatgggtgcggccataggaatgatcgccccatggggagggttcacttatcatgatgtcaccctcagaaatctctccagacaaatagacaacatagctaagagtaccagagatagcatctctaaactcaaggcctccatagattctctagcaaatgtagtcatggacaacagattggccttagattacctcttagcagagcagggtggagtctgtgcagtgatcaataaatcctgttgcgtttatgtcaataacagtggggcgatagaggaggatataaaaaagatctatgatgaggctacgtggctccatgactttggaaaaggaggtgcttcagcaagggccatctgggaggctgtgaagtctgccctcccctccctcaactggtttgtccctttactgggaccagcaacagttatactcttacttttcctctttggcccttgtttctttaatttactgattaagtgtgtctcttctaggataaagcaatttcacatgaagtccccccaaatggaaagatatcagctatctgtcattggaggccccagcacctataagcacatctcccccttggatgccagtgggcaaagattccgggaaactatggaggaattttctctctgagacagagcaagagagggagaccctgatgacttcttcgccccatgtcagcaggaagtagttacagaagacccacgacgtccttacaaccagagcttttcagggtctccatctcttgaggagggaaatattagggtaggcaggtaggcaggcatgagcaggcaagagagcccttgggaaaggaatctttagaaacgcagcccactgatagcttccttggtgatgctgcccacagacagtcagcacttctctaataacccatcctagaacagccttttgcttttttttttttttttttttttttttttgagacaagttcttgctctgtctcccaggctggagtacaatggtgcgatctcggctcactgcaccctccacctcccaggttcaattgattctcctgtttcagcctcctcagtagctgggactacaggcatgtgccgccatgcccggctaattttgtatttttagtagagatggggtttcaccatgttggtcaggctagtctcaaactcctgacttcaggtgattcgctcgcctcggcctcctaaagtgctgggattatagacgtgagccactgcgcctggctactcagaacgcttctgaatggcacattcatgaaaaatcatgtaaggttctcataaaaacatctgcccagccattagtaggagtagacacgtccttttgatcagcccgccctgttctgtctttctgggtgtactgttttgatgactttaaaagctcccataaaaactaaggcactagcagctggctcattcttctgatgtcctctctttttaaataaagcttacttaaccctttaactctttctgtgtgtctcctgactgaattccttccttgaggaagaccaagaactgaaggattccccacccctcgtggtaaccaaaggtctatgaaggatttagtgcatctaaactagtaaatacaggctgggcgtggtggctcacacctgtaatcccagcaccttgggaggctaaggcaggtggatcacctgaggtcaggagttcgagaccagcctggccaaaatggtgaaaccccgtctctattaaaaatacatatattagccaaacgtggtggcgggcacctgtaatctcagctactctagggggtgaggcaggagaattgcatgaacccgggagatggaggttgcagtgagctgagattgcaccactatactccagcctgggcaacagagcaagactccatctcaaataaataaataaataaataaatagctaaataaataaactagtaaatacaaactgcactcaactgtccaagaaatattctttatttcttaaacgttgggaaaatataattaaaggcaaaataattttctcctcacccagaaatcctctccacaaaggaaaacaataaattgataatcccagcccagttagtggttggtgaatgcctctaccttaatcaatacatgtttcgaagcagtcagcatctattttctcatgaaagatgactccagagaacctggtctttgctttgcctggtaggtgaggaataccttaatcttatcagaaatatataaattggtcgggtgcggtagctcatgcctgtaatcccagcactttggaagtctgaggtgggtggatcacgaggtcaggagattgagaccatcctggctaacacggtgaaaccccgtctctactaaaaatgcaaaaaattagccgggcacagtggcgagtgcctgtagtcccagctactcaggaggctgaggcaggagaatggcgtgaaactgggaggcagaacttgcagtgagctgagattgcgccactgcactccagcctgggcgacagagcaagactctgtctcaaaaaaaaaaaaaaaaaaaaaaagaaatatataaattatgtggtttttcacaatatttactaaatttctcaactcacccactgtgaagacagcacaatttgaaagggacaccactcccttgtaatggaacacaaactcagcttctgctccgtaacaataaatagtaatagcaatactaaatgaaatattaagtagtttcatgtaagtatgtatacaattgatagtttgttattattttcagttttgcaattggtacaaattccatagaataattttccttctttctttttttgagactgagtttcgctcttgttgcccaggctggagtgcaatggcgtgatctcggctcaccacaacctccgcctcccaggttcaagcaattctccttcctcagcctcccgagtagctgggattacaggcatttgccaccacgcctggctaattttgtatttttttagtagagatggggtttctccatgttggtcaggctggtcttgaactcccaacctcaggtgatctgcccgcctcggcctcccaaagtgctgggattacaggcgtgagccaccgcacccagcctgaaaagttttttctgcagctattgagataatcatgggggttttgtccttagttctgttcatgtgatgaatcacatttattgatttgcgtaggttgaaccaaccttgcatgtcagggatgatatccttgatgaacactgatacaaaaatcctcaaccaaatactagcaaactgaatatagcagcgcatcaaaaagcttacccaacatgatcaagtaggctttattggcatatatatgccaataaagtaagataatgcagaatgaataaatctctagaaatatataacttactgccaggcgcagtggctcacgcctgtaatcccagtactttgggaggctgaggcgggtggatcacaagatcaggagttcaagaccagcctgacgaacatggtgaaaccccgtctctactaaaaatacaaaaattagacagggatggtggtgcgtgcctgtaatcccagcaacttaggaggctgaggcaagagaattgcttgaacctggaaggcagaggttgtagtgagccgagatcacgccattgcattccagcgtgggcgacagagtggtactttgtctcaaaaaaagaaaagaaaaagaaaaagaaaaaaaaaagaaatatataacttaccatcactgaatcaaaaataaattgtaaaaatctgtacatgcctataaataacactaaagtagtaatgaaaatgtcccaacaaaagagaccaagtatagacacgtaatttgtaatcactgcataattctactgaacatttaataacaaattaacactgagaacaatggttctccgctgcgacgagcaggaggaaggaaagctgaacagaaacatcttggtgcctaagccgtatgttgggggtttactataaaacaaatacattaatcatgtgatgtttaaataagtcgaatatttaataattactgggttaaaaaatggttccatcctctccgatggcaaagaagttctgatcctctgtctgagaacaatgataaccattttcaccaaaaacacatttcacaggcgctcctccaggaatacacagactgtggtctgtgttctggactatctgcaaatagtttaacatttgctgtttgacatttacatggacttcatatcttaaaatgggtaatgagatgaaagcatcttatcactgatgtctgtgtctcagctttccattccattcccagtcatgaagaatttggagtcagaagaccaggcgcggtggctcacgcctgtaatcccagcactttgggaggccgaggcaggcaaatcacgaggtcagaagattgagaccatcctggctagcacggtgaaaccccgtctctactaaaaatacaaaaaattagccaggcgtggtggcgggcacctgtaatcccagctactcgggaggctgaggcaggagaatggcgtgaacctgggaggcggagcttgcagtgagccaagatcgagccactgcactccaggctgggtgacagagcgagactccgtctcaaaaaaataaaaataaaaataaaaaagaatttggaatcagaaacacagtgactcacttgtagagtttcaaacataacataaacgaggcaggaatgctttccccttagtgttctaattttaaagcatttagcaggaacttgtgcacagtaatatttgacttcatgggcagtttcttgaatcctgttctgcaaagaggtggcatgcatccagatgtggcccctaaacaatccctgctgcccagcatacaacccacacaaatatacgacaagaaaacaaaaccttagaccaatatccctgaaaatattggtgaaaaagtcctcaacataatattagggggcccacaccccatctccaatccaggccccagtggagcttcttcccaagttcatgtcactaggtcacgggcaatggaatgtaagtgagataagagggactgagggaccgcatgggtgagtgagcaaatatgtcaggcaggatgcttcagactcaaagacttgcaactccaaagaatgacattttgttattgtaggtaactcctctggtatgagcagagcagggcagggcaggagagggctccccctccccatacacacacatcaggaatgtcaggcaactatcagatgatggtcaggtggttgttaaacatgtaaaataatagtcacagctggcaccagggaaaggcaggctcctcacacacagaaaacacctgaaactggtgatctgctgcttcccatgagatctcaggagttgggcgagtggactcaagcacgcacatgcggacagcccaccccaagggaagaatcagggaagcaagaccccggaagtataccaatgtataaaaccccaagtcaaaaggtcgaagtgcacacttgcctttcaagtcacccacttggcacttggccgtcttccaactgtactttccttcctttcatttctgctctaaagctttttttcttttcttttcttttctttttttttttttttttttttgagacaaggccttgctgtgtcactcaggctggagtgcgatgacatcatcttggctcactgccaacctccacatcctgggctcaaaagattctcctgcctcagcctcccaagtagctgggattacagccatgcaccaccacacccggctaatttttatcttttttgtagagatggggttttgccatgttgcccaggctggttttgaactgctggactcaagtgatacgcccatctcagcctaccaaagcattgagattacaggtgtgagccactgcgcctggccatttctgctctaaaactttttattcattcattcattcattcattcattcatttatttttgagacggagttttgctcttgttgcctaggctggagtgaaatggcgccatctcggctcactacaacctccgcctcccacgttcaagcgattcttctgtctcagcctcaggtcaggctgatctcgaactcgagacctcaagtgatctgccgcctcaggtcaggctggtctcggactctcgacctcacatgatctgccgccttggcctcccaaagtgctaggattataggcatgagacaccgcgcccggccctgctctaaaactttttaataaacttttgctttcattcctgctctaaaacttgcctcagtctctccttctgccctatgcccctcagttgaattttttcttctgaggaggcaagaattgaggttggtgcagacctgtacggatagggattcaccacctgtaacaatttcagaaataagagaaataaaaatcaaccgatactattactttacctgagtaagagccatccctgtttccttttcttcctcttctaggcatcttccttgggtaacatgaaaaagcctttacaagtcgatcctgaatgtctaaaatatgccatttaatgactggaatcaacaccctcatttttgtgcctcaaacacccattcagggaagccctcactgtggaaagccagttctctgggagtcattgcaccagatggaacacagggacgacaggctcctacaggaagaccaacaggtgagttttgggcccatttcttcagaacccgctcccctcccagagaagcccacacacacactgcagccgtgggaagctgggctggactgagcttctcttcaggacacagacccagccctgaccaaaccccatgcagagcacagcccccctcacccatctgtggatcacaggctgatttcagcccttagaaacaaagggcggagcctgggtgctcaatgctggacacccatggaatcacctttaaatattattaaggacacgtcccaatgtatttgaatgaaaacttcaggtaagggggcaccagaggtgtgcctgcaaaatgccccagatgcctgctggactcccagaggagagttgaagagacaattggacacaggattccagtgttcaggggagaggtctgcagggaacatggagccgtgtaggtgggtttaaagccatgagatgagatgataagggcagtgggtgtgggcagagatcagaagtccgaggggtaagctgagggtcactccacattcagaaaacagagctcaagacatactagaagagaaaagtgtaaagtgatcagggaggcaagaagaaaattaagagaaatacatttttattttttttaattaaaaacatttttgacgtggagtcttgctctctcgcccaggctggagtgcagtggcgcgatctccgatgactgcaacctccctctctcgggatcaagcgatttgcctgcctcaccctcagagtagctgagattacaggcgtgcagcaccacatccggctaatttttagtagagacgggggtttcaccatgttgggcacgctggtctcgaactcctgacctcaaatgatccacccgcctcggcctcccaaagtgctgggattacaggcgtgagccaccgcgcctggatccttctttcgctcttcccgtctctgcgaatcccgacccatcctctactttgccatgtgtttatgggtttccttcattctttcctctcagtttttgtaattcactctcagcccctctctgtttcctgatccctttggcccacacattcacaggagggtttggagtaagacacctggatcctggaggagcacattttccagcgggtggagctgggcaggcaagaacaccgggtgtcacaggacaggccccgggcacctccccaacgcgggcgcaggggaagcggtgactgcgaaggggaggcctggggagcagcagggcccggcacgaggaggagggaggtggggggcgacggcgccttaggacagggtagggtctgcaggagcctaggaccaggcggaggacgcggtctgcggcgctgcgctccagggccgacgacggagaggctgggaggcgctcaggacgggaatccacctcgcaggtgaggactttaaaaagcgcggggcgggaggaggggtcaggaaagggttttatgcgggaagaagacgcgaatggcaggggacagggactggtctcagagcgagttttacccacatggcgaggtccgtatttacctcgggtgaagggcgcgatgcggggattttaaggtcagcagagcgggtgtggaaaagcgggacggcgaatcgaaggcttaatctacacctaggcacactcttgctcggcggtgtcaccttcacacaccgcgatccgcttccgggactccaagaaactgcacgtgcgcgcagagcccgggtagcctggggcggagcccggggagaggcggggtctgcagagggaccgcgggggcggggcctgtgcagttgtaaggtaaaaagcatagagttgtgtgggccccttctgttggaaagcaaaatgttttcttcccaccaagatgaaaacggtttatctcaaaactatttttgccagcaggttggacccgatcctgctagggagtctcctgcagctcagcggtctgggaactgcgaattcggtggggggaggggggtccaggaggagcagtgagtgattggatccaggaaagttcctgcaattcaaattaattggagtaacttactttaaaagccctgaaattatctgtgaaggggttgcaaactagactgtgaaatgcaaaactgcccggaacaaatgtgatacgtaatgctattgcccaaaggatcctcctttccatttctatcccatacctatctcaggggaagagtcaagtctgtgcttccagagacttttataggacaacacctggaccgtgggctgtggaccgtggaaggctaaaacccgcagtaagccagatcaccaactgctgctttaaaacacgcaataacttttaaaaaaaaatagatatgaattgtattgttcttccttatacttgttattcggttccacggttgacaaaacctcaaataactttgagataaactttttttttttttttttgagatggagtctcgctctgtcccccaggctcctggaatacaatggcgcgatctcggttcactgcaacctctgcctcccaagctcaagcgattctcctgcctcagcctctggactagctgggattacaggcgcgtgccaccacgcccggctaatttttgtttttagtggagacggggtttcactatgttggccaagctggtctcaaactcctgacctcaagtgatgcgcccacctcggcctcccaaagtgctgggatgacaggcatcagccaaggagcccggccgagataaactttctttaaatcatactatgcttaaatcgataatatctaaactttttttttttttttttttttgagattgagtttcgctgttgttgcccaggctggagtgcaatggcgcgatctcggctcactgcaacctccgccccccgggttcaagcgattctcctgcctcagcctcccgagtagctgaccaccacacctggctattttgtatttttagtagagacagggtttctccatgttggacaggctggtctggaacccccaacttcaggtgttccacccgcctcagccttccaaagtgctgggattacaggcgtaagtcactgcgcccggcactttttttttttttttctttttaagattaggaaacagacgtcagaagcagccaaatcaggtctgtaaggtggatgcctaatgatttctcattgcaacccactgttgcaaaactgccgttgtttaattagaggaatgaccaggaacattgtcatggtggagagggacgctggtgaagtttccctggacatttttctgctaaagctttgggtaactttctcaaaaatgctctaaaaataaataagtgttattctatgtccctctagaaagtcgacaagcaaaatgccttgtgcatcccccaccgccaaaaaaaaaaaaaaaaaaaaaaaaaaaaactattgccatgaactttgttcttcaccgctcagcttattttaattaattaattattgagaaagagtctcactctgttgcccaggctggagtgcagtggcgcaatcatggtgcaccacaacttttacctcctgggcttaagtgatcctcctacctcagcctctcaagtagctggaaccacaggcacacaacaccatgcctggctaattgttttataattttttgtagatacagagtctccttatgttacctaggctggtcttgaactcctaggctcaagcaatcattctgcctccatctcccagaatgctgggattacaggtgtgtgccacagagccaaggttcactggtcagccttttgctttgactggactatttccacctcttggtaaccattgctttgattgtggttttttcagcattgtactggtaaagccatgtttcgtcttctgttaaaattctcctaagctacctggagttcacacagctgcactattcctttatttttttattattattattttttgagacaaaggttcactctgttgcccaggctgaagtgcacttgtgcaatctcggctcactgcaacctccacctctttggttcaagtgattctcctgcctcagcgtcccaagtagctgggattacaggcatgtgccacaacgcccggctaattttttttgtatttagtagagacggggtttcatcatgttggtcaggctggtctcgaactcctggcctcaaatgatccacctgccttggcctcccaaattgctgggattacaggcatgagccacctcacccggccctgtaccgttccatagaaagagcttgtgtatggccgggtatgttggctcatgcttgtaatcccagcacttcgggaggccaaggcagatggattacttgagctcaggagttcaagaccagcctgggcaacatgatgaaaccccatctctaccaaaaaaaaaaaagaaaaaaaaaaaaaagaggaggaaaaaataaagagctcatgtagaccaggtgcagtggctcacacctgtccaccatttcccaactgagctactgcagctccctacctcctgggagcaagctacctaggagacactccatcacccccttccctgttttggctgggccacacccctggctacttaaagcccgaaaacacagtgcgtgaatcaacctcgttgggttttggacatgtaagttacctgagctacccaccacatatatacctcttcaacgtaactccttgcttgctgttggacactggtgggaacggtgcatcttatagccagagctctgtgtcaccctgtaacatgaactgcccattctcactcgggtgctcacaaaccttatcgataaaattggacaggctcaatagagctcaactataaaatggaactggcatattcaagatgaggcacagcagaacctcaagggaccagtatactccatgaacaaatgggtagcttacaagaaggggtcaaacagtccttaaaggatcctctggctcctcttgtggctacctgggacccaagattcacatatatgcccaccaagtgtatggcatggtttactgatgtctctgcaaaacaataaacacacagggtctactgggcttcagcccagtggatggccattctttgacccagtgaatggccattcagccagtggatggccattcttgactaagactagacatagacattctgcctaattagccaaactgcatgcattggtaatggccctgcaggccacgtccaccaccatatctcatcacattttcatgactcatgagccatgcagacttgtgtggaaccctttaatgctgcaggacagccaggggctcctttggttcacccaatcttcgaaactgttgtattaagacctttgtttcaacttcatcaatttccatttccattttactcatcccgttttttttttttttttttttgagacaggctctcgctctctcacccaggttggagtgcagttgtccaatcactgctcactgcagcctcaaactcctgggctcaagtgatcctcccatcctggcctcctgagttagctgggcccacagaagttcaccaccacacctgactaatttttgtatttttttgtaaaacagggtttcgccatgttgcccaggctggtcatcccatttcttaattaccatctaaagatttccactctgctgggaggagagccatgactctcccctacctttccccgcttagtttcattttatgaatgcttttttttttttttgagacggagtctcgctctgtcgcccagactggaggagtgcagtggcacgatcttggctcactgcaagctccccattccaggttcaagccattctcctgcctcagcctccagagtagctgggattacaggtgtgcgccaccacacccagctaattgttttgtatttttagtagagacagggtttcactgtgtaggccaagctggtctcgacctcctgacctcaagggatccacccgcctcggcctcccaaagtgctgggattgcaggtgtgagtcaccatacccagcctgtgaatgcttgctttattcaccttttttcttaatgacgattttaaaatttccaccttcatgaggagaagtcctttgaatctcaactattttcccccatccattctcttcttaattaacttgatactgttaattggcacttgaaagttccaacaggagatgtggagacagcaaatttgataaggcttcctgagctgtcttttggttttgtagaagtaaggtaccgtgggatgtatacattaaaggaacaaccttatttttctccccttccttgcttgtagttctcaagaataacttcagaatgttattctgaaggtaacaccctgaaatatgaagaaactggccaaagcagccgggctccattccagagccccctgcccccctttcaaagaacaggatgtccttcagtgctttagggcggctcatcacgaggccatgtgccataaaacctagggtgggtgctctctggggtccctcagcatcagtgccggtgggacaccagtagatgagactccatcttccccaagcagttttcctgagccttgggggaccagcttgcaatgaatcagtcctaggcttctactgccccttgttgcctgtcagtagtcaactcactttattgaacttgtgtgcatgggttctgtctcactggagtcagacattcggtaaccagtgcgaagtgaacctacttcacaggcaaggagagtctgtaatcctcctacgcttggcagtgggaatgcacaatggcacacccactatggaaaacagtatgttggaaaacttcctcaatatggtgcctacaaaaccttacagcaaacatcatatatcatggtcaaaaagtgaaagtttccttcccagggttggggacaaggcaaagacgtacactcttaccacttctattccacatagtgttagcaattcttggctgagggtagtggctcatgtctgtaatcccaacactttgggaggctgaggcaggaggactgattgagtccaggaatttgagaccagactgggcaagatggggagaccctatctatctctacaaaaaaaaaaaattgaaaattggctggtggctgggcgaggtggctcacgcctgtaatttaagcactttggaaagctgaggcaggaggatcccttgaacccaaatgttcaagactgcagtaaggtctgactgcaccactgcactccagcctgggtaacaaagcaagaccccatctagaaaataataatactagtaattgaaataagaaaaataatagagaccaaaaaggaaggcataatactgtacacgatgagatggttgtggtaagctaatgacccccacccccaaagatacacacacaaaggatttccgtatcaatagccctataccctgtattacatggtatctcaaatcagagtttgcagatgtgatctggctgaggatcttgagatggcagaatatccaggattatctggttgaagcaacataatcacaagagtccatataggaaaaatacagatggacttagaatcacagagaattgacaatgcttgcatagcaaagagacaaagagattttatgacactaccttctggctgtgaaaacggagggacgtagaccatgaggtaaaggatctaagtggcctctggacctagcaggggtaaagaaataaactctcccctagagagtcaagaaggatcatagttctgtaaacctgacttctgaccaccacacattaacagcataaatttgtgggtttttttttttttttttttttgagacagagtcttgctctgtcgcccagactagagtgcggtggcatgaacttggctcactgaaacctccgcctcaagcaattctccagcctcagcctcctgagtagctgggattacaggcacgcgccaccgcacccagctaatttctgtagttttagtagagatggggtttcgccatcttggccaggctggtctcaaactcctgacctcatgatccacctgcctcggcctcccaaagtactgggattacaggcgtgagccaccatgcccagcctaaatttgtgttgttttaagccactcactttgtggtaattgttacagcagcaatgggaaattaagtttatgtagaaaaccctaagaaatctaaaaaatctggagaacgagattttaaggaaatagactaccaaattaacatacaaaaactactttatttctatatactagcaattaatacatggaaattgaaaataaaatacaatactcctctggtttgaatatccccaacaaaactcatttggaaacttgatccccggtgtggccatattgagaagtggggcctttaagaggtcattggatcatgagagctctgctgtcatgaatgaatcaatccatgcacagattaatggactgtgttatcatgggagcagaagtggtggttttataggaagaagagagacctgagcaaacagcatactcagtgctctcacaatgatgtgctacattgcttcaggatgctgcagagtgtccaccaagaaaccctaaccagcactgaccaaaggtcaaaaaatgtctagtaaggagacctttatttcttacacagggttgcagcctgcaggctgggaagcatggtctctaccagaaacaacacaggcagttcagaggaggaaagttgcggcaggaatttatactgaatagcaatatgttggatattaagtaaacatactcaataggttatgggagagtcatgcgtgtgtgataagcaaacatacatgttcctagtttatctaccagaacaaaataaaattctcattttctatattcactcttaagaggaaactcatgaacattaatcttttcaaattatatcaatattccaagaacatcatgaaggaggttttattattctccactttttttttttttttttttgagatggagttttgctcttgttgcccaggctggagtgcgatggcgtgatctcagctcactgcagcctccaccacctgggttcaagccattctcctgcctcagcctcccaagtagctgggatttacaggcatgcaccaccacacccagctaatgtttttgcatttttagtagagacagggtttcaccatgttggccagtctggtcttgaactcctgaccttaagtaatccacctgcctcagcctcccaaattgttgggattacaggcgtgagccaccatgcccagccaacgttttttttttttttgttttgttttttgagaacgagtttcgttcctggtgcccaggctggagtgtaatggaatgatctccattaatagaacctctgcctcttggattcaagcaattctcctgcctcagcctcccaagtagctgagactacaggcatgcaccactaagcccagctaagtttgtatttttagtagagatggggtttcactatgctggccaggctggtctctcctgacttcaggtgatctgcttgccttggcctcccaaagtactgggattacaggtgtgagccaccgtgcctggcctgatttatatttctcgcattcttactatgtattttcacttcatggaaaccaagatgcaaagcatgggtcttatttggcacacaagaaactgatgtggaaatataataatgtggtgcatatgcatcaatggcaatgcagattttggggtgtaagaatgtgaaattaactttcagtaagattttcattataccccaataagtatcctaagccacagtgtggggcacgtaattcaagcacaaaatgcggttataggtttccaaaactgcgttatttgatttcaccatgaaaaaaattgttcttgatcgtttaagagcctagtggtgtactgctattgtgttatggagtatcctactgagacaggataaaactatgttggcagaaagaatgtgattcattcatagagaaaaaccattctattttattagttaaaacattatatctatgatacattctgaataaaacattagcaaaatgtgcttcaagcagataatgtgagttctactaaagaatatgttactctacttctgttgattaaactcttcactctgacaactactctctcttcagtttttctttttcttctttagatggagttttgttcttgttgcccaggctggagtgcagtggcatgatcttggctcaccacaacctccgcctcctgggttcaagcactctcctgcctcagcctcccaagtagctgggattacaggcacctgccaccacgcccggctaattttgtatttttagtacaattggggtttctccatgttggtcaggctggtctcgaactcccgacctcaggtgatccacctgcctcagcctcccaaagtgctgggattacaggtgtgagccaccgcgcctggcctctctcttcaatttcaaaacaagatcaatttttcatcactctttgctaaacaacaggtattgctctttgatgcataagagggcgaccttttcccctgcagtatttctaccacacaatcagtgtctaattacctattactctcctcccacaaaaatcccaatgtcctaaggtcttggcctgctccatttcatgttcagttgatagaccatttctttcctctaagccacagtactctcctggtaggagaaaggcaccctgaacattatcagaatggtgagtgacatcatagttttacattgtttttcgccactcccaaatgctaattcagatgatacttaattttaaaagcaaagtcctccttcttcacaaattggatagaaataatccttcacctaatcaatgatcttcacccaatcaatgatccttccatcccaatgatctttccaagaaagcaccatggaaggtgtgtaaggatgcacaataagatttcaaagttcacattgaaacgcaatagtaggctttccaaaaaacctcaaataactcagtgaaacatttcataaggtgaaggtaactgactgcctacaaatatcctgcaaccttttcgtatgtgagttaaaaatatataatttttagcatatttggacttgtgagtattctacagtgtataatatcaaaggcaaacagggaaaccagagactgttattcctcctaggaatcctcacttaccatcggtcactgggtaatggcctcaggatgcatattacatttgtttcgtttcatcaaagatataaatcttgatgcctagtaacctgcgaggcctggatagaccctctgccacatatgtttacatgatgtctcttgcttatggcctctcatatctattaatgcttcaactcatgagggattggccactgtcactacatttgtaaggattctgtcaagaatgaaattaactgatgtgaaaggagtgaattgtacctaatgacctcaccacactcatttgtaaggtttctctccggtatgcattctgtgatgacttgcaagatttgaactctgcctgaagaccttgccacactcattacatttgtaacgcttttctccagtgtggattgccatatgggtagttagacttgatcttaccctaaaggctttcccacactctgtacacctgtaaggtttctccccagtatgaattcttcggtgatttgccaggtgagcattttgagtaaagaccttgccacattcattacatttgtaaggttttttcccagtatggattgcctgatgggtggttaggcttgaacgaacactgaaggctttcccacactcattgcatcggtaaggtttctctccggtgtgagtcctttgatgatttgcaaggtgtgagttctgagtgaagaccttgccacattgattacatttgtaaggcttctctccagtatggatgaccttatgggtagttaggtttgaatgcatactaaaggctttcccacactcattacacttgtaaggtttctctccagtatgaattcgccgatgagttgcaaggtatgaattgtgcctaaaaaccttgccgcattcatgacatttgtaaggtttctctccagtatgtattgcctgatgaaaagttaggcttgaacgatcactaaaggctctgccacagtcattacacttgtaaggtttttctccagtatgaactctccaatgccttgcaagttgtgatgtttgagcgaagactttaccacattcattacacttgtaaggtttctctccagaatgaattccccgatgacttctaaggtgtgatttttgagtgaagctcttgccacattcaatacatttgtaaggtttctctccagaatggattgcctgatgggtagtcagacttgaacgaacactgaaggctttcccacactcattacacttgtaaggtttctctccagtatgaattcttcgatgatttgcaagttgtgaattttgagtgaaaaccttgctgcattcattgcatttgaaaggttttgttccagtatggatgacctgatgggtagctaggtttgaatgcatactgaaggctttgccacattcattacacttgtaaggtttctcaccagtatgaactctccgatgccttccgaggtatgaattgtacctaaagactttgccacattcattacatttgtaaggtttttctccagtgtggattgtctgatggattgctaggcttgaacgaacactaaaggctttgccgcactcattgcacttgtaaggtttctctccagtgtgaattctccaatgacttataaggtgtgaattttgagtgaagagcttgccacattcattacatttgaacggtttttctccagtatgaattaactgatgggtagttaggtttgaatgtcctctaaaggcttttccacactcattacacttgtaaggtttctctccagtatgaattcgccgatgagttgcaaggtatgaattgtgcctgaagaccttgccacactcatgacatttgtaaggtttttctccagtatggatgacctgatgaatagttagatttgaacgaacagtaaaggttttgccgcactcactgcatttgtaaggcttctctccactatgaattctcctatgacttgtaaggttcgaattctgagtgaacgccttgccacattcattacatttataaggttttccacaactgtttgcttttcgtctttgtgtgagtaatgaaaaatggttaagttcatgatattttttagacctgtgggtttggacactagaaggaatttgttgaagtggtgacactgaggaaccattgttggtagacttctcaacttgattacattcatacattttcccctcaccttgaaatagctgcagttcaggcagatgagaatgaaagcttactccaagctgattgttcataagcttgttttctatgtctcttctgtcgcgttgatctcttttaccttctttctgggccataagcactcccttgtaatttcctgtgtcatctctccattgacactcaaaatcatgcacatttttctggggttccttgaaggaaaagtcttcaatgtcagggctttcgtgtctttccaacaccactgtgtggaatactgcttctgtactgctcttctcttttggtagcaaatccttgattgtacatttaggagggatatctacaagatataaagaaccacataatttccaattaattacagtatagaaataaatattttacattgaaaacatattccaccaaaagtaatacttatattgaacagactttggaacttcagaactgtgaatttcaattgttaggaacaaaaatgtttttttttttttgagacggagtctcgctctgtcgcccaggctggagtgcagtggtgtgatcttggctcactgcaagctctgcctcccgggttcacaccattctcccgcctcagcctcctgagtagctgggactacaggcgcccgccaccacgcctggctaattttgtttttgtatttttagtagagacggggtttcaccatgttagccaggatggtctcgatctcttgacctcatgagccgcctgcctcggcctcccaaagtgctggaattacaggcgtgagtcactgtgcccagccaaaagtagtattttttaacaaagaaaatgcagttacatgtaattcaaatatttgggaagggctggctgttgtggctcatgcctgtaatcccaatgctttgggagcctaaggtgggaggatcacaggaggccacgaggttgagaccagcctgggcaacacagcaagactccatctctacaaaaacaaaataatttaaaaattaggccaggtgtggtggcttatgcctgtaatcccagcactttgggaggctaaggtgggtggatcatgaggtcaggagattgagtccagcttggccaacatggtgaaaccccatctctactaaaaatacaaaaattagtcaggcgtggtggcatgcgcctatagtcccagcttctcaggaggctgaggcaggagaattgcttgaacctgggaggcagaggttgcagtgagccgagatcgtgccactgcactccaacctgggcgacaaagcaagactccgtcaaaaaataaaaataaaaaaattagtttggcatgctggcatgtgcctgcaattctggatactcaagaggctgagggtgctgggtgcggtggctcacacctgtaatcccaacactttgggaggccgaggcgggtggatcacctgaggtcaggagttcgagaccagcctggtcaacatggcaaaactctgtctctgctaaaaatataaaaaattggctgggtgtggtaatgggcacctgtaatcccagcaacttgggaagctgaggaaggagaattgcttgaactcaggaggtgaggttgcgccactgcactccagcctggggcaacaagagcaaaactccgtctcatcaaaaaaaaaaaaaaaaaaaaggctgaggcatgaggattgccttagcccaagagttcaaggttacagtgagctatgattgtaccactgcactacagccttagagacagtgagatgtcttaaaaaataaaaaaataaaaaaaaaatcgggcagcctagattcaaactacctatgaccaaaacactcacgttgtgaatcctatgttagccatcagaggattatttttccacgctgacctcacggcacataccaattggccaaaaacatatggctatctcaattgaagaaaaataagttatacacatttaaagcatattcattatgtacaaatacatactaaagtacaacataatatattataatggcaaagagctcacaggaaacataattaagaagcgggaattttgaactgcaaaaccatcatagcactaggaaaatgaacattcaataaaactatgtcagaaaaaaatgtgttgaaatacttgttatataactatctatatccacacagagcagataattttgcagcattagtaagtggtacatgacagttatatttctttctttctttttttttttttttagacagagtcttgctctgctccccaggctggagtgtagtgctgcgatcttggcttgctgcaacccccgcctccagggttcaagtgattctcctgcctcagtctcccgaatagctgggactgcaggcatgtgccatcatgcctggctaatttttgtatttttagtaaagacaggatttcaccatgttggtcgggccggtctcgaactcctgaccttgttatctgcctgcctctgcctccccaagtgctgggattataggcgtgagcctctatacctggcctgacagttatatttcacaatacctgctgaaaaccataatgtattcattttatgaaaatcaactaataagatattctagcagcctatgataaaatgaattgagaggaataactgcatatataaaatgttcttgtttaaggccatgtgtggaaacttaaaaaaaaaattattggccaggtgcagtggctcatgtctgtaatcccagcactttgggaggctgcagcaggtggatcacctgaagtcgagagttcgagaccagcctgaccaacatggagaaacccgatctctactaaaaatacacaattaaccaggcatggtggcgcatgcctgtaatcccagctactcgggaggctgagacaggagaatctctcgaacccaggaggcagaagttgcggtgagccgagatcgcaccattgcactccagcctgggcaacaagagcgaaacttcatttaaaaaaaaaattattgtccgtggaataataaacagttttgtcttaagagaaagaagcatttttatttagaaccaacacaataagaactggaatatgatttttaaaaaaattctatattgacaaattatagttatatatatttacaggaaacaaactgatattctgttataggtatacaatatggactgatggaaacaagcctattaccatataagtcatctcaaaaacctatcatttactcctaatgttttcacccagtgaccaacatctccctattccctccagtccccaacctgtggtaacccacattctactctttgctgctattagttttattggtttagattccaaatgtaagtgacaacatgcagtacttgtatttctgtgctgaagcctggaaaaacagaatacgcaccccatgtaagactgaggatcaatgacagaaggattttgttaggtgtctttacggttatgctgagaacaatcttagaagatagaacccactcgcttatcacacacccccatgaaagtggcaaaagcagaatggaagaaatggccgagggacctcgacaggcggagacggctggagactcttccatgaggtttggggcagcagatgccaaggagcagcagccaatgtttccatctcctgagcaggtcttccacgcacaggaaatggggtggaacataaacaggtctagacgtcaggactaaggactatggaggcttcccctctgacccatatggactaagaactgagcaccatatggaattaaatacagagggagagaccaagaaagaaagcagtttcttcagaaggaaccatagagttcaaatgacagggtgttgtccatcatgataaagactttgcctctatctctaaggcaacttattttcccaaagaactctctcatctgcagagagtttcccactttatttatttatttattttgagacggagttttgttctgtccacccaggctggagtgcagtggcatgatcttggctcactgcaacctccacctcccgggttcaagcaattctcttgcctcagcctcctgagtagctgggactacaggcacacgccaccatgcccggctaatttttttttgtatttttagtagagatagggtttcacaatgttggtcaggctggtctcgaactcctgacctcaagtgatctgcccaccttggcctccctaagtgttgagattacaggcgtgagctactgtgccccctcccacactctagttaatgagtggccttctctctgcccatctgagctcttacctgtgaccacgcctttgacacattccggcgttcttggttttcttgctattttcacacagctcttcacagtccagggctctttcccttcctccaacatggagataatattcatatcaaaatgacacagtcctgtttataaaaagaaaggatcacaatgtgccggggcttttccagaatcccagccctatgtttacatgagaggacattatatgtggatctaagaaaacttcaaaaattcatccactgggccaggcgcggtggctcatgcctgtaatcccagcattttgggaagctgaggtgggtggatcacaaggtcaggagatggagatcatgatggctaacatggtgaaaccctgtctctactaaaaacataaaaaaaaattatccaggtgtggtggcgggcgcctgtggtcccagctactcgggaggctaaggcaggagaatggcatgaacctgggaggcagagcttgcagggagcctagatcacgccactgcactccagcccgggcgacagagcgagactccgcctcaaaaaaaaaaaaaaaaaatcatccactgaatgcctccttctgaatacccaggaaacatggtacatgctgatagaaggctctattccaccaacaacttaatccaaagcagagaggtagaaaacaggaaatctgacatttcaaaagtctaacacaatgtattatgcatacaaaagctctgaaacctcaaatgatgaagtacaaaggaggcagaacatctgagaaaggggaagattaaagtccaggtttcccatgattaagctttccatttcagagtcaacaggacttcaatctcagtcaagcaatgcaggggctctccagggactcgtaagggaaaatgcaacaatagacaagaacagatcttgacttctggaagaaagtcatcctcacccagagaaacaaggttccagtagttctccaacatcacgtccctgtataagatcctctgagcagggtccaggcatttccactcctcctgagagaattctatggccacatccctaaatgtcaaccgtacctaaaatgaaaaacacatttcaccaagtggctaaggggagagttcaaaatttcacataaaaggagaagaggagaaaaatgtgagaataggttaaattgaagtgggtgagctgacagatccagattgtgacaatgtgacatacagatttggtcttcatccccctctcctgacataagagctcacttgaaatcagtggagtgataagtatctttttgtacattaatgggataattggtgtctggagcacctaggtagcttcaggatggagggcggtcaccggaactaaggctcggtgggtggtcactggaaaggctgaggctcggttagactaagcctctgtcctctcgggaggacagagggaatgaaagttcagttgatcaccaatgccaataatggaagcaaggcctccataatggggcctccatgaaaactcaaaaaagacagaatacatgagagaatacatcccagctcctcactcctttcccatatctcaactaatagatcacttccatctagatgttcatctgtgtgctttgtagcatcttctataataaatgggtaaatataagtgtttccctgtgttatgtgagccactcaagcaaactaatcaatttcaaggagggggtcatcagaattcacaattcacagctggtcattgagaagcacaggccacaacttgtgtttgtgactggcattaatgtgtgtgcgctgttgtgggattgagccctcagcctatgggagctgaccctatatccagatagacagtgtcagaatggaatcaaatatgagaacacccatttggtgtctgttgcagaattgtttatttgatgtgtagaggaaaacccaatacatccaaaatcacagaagtatttgtattatggaagcaaagcaggagaaactgagtctgtttttcccatattttcctacgcattaaggacttttgagcaagttatgtctccctaattctgtcttattattcttttacctaagaggttgtgatatcctctatatcagtgtcgatttctcagttttatgggcaataagtatacaaataaaaaacagaaaacaaggttatctctatggaagtgttagacattatgtttgacatactgagtgatattcaataactacatgaactaaataagcacaactggtatcttaagaaatgataatgcggccgggcgtggcggctcatgcctgtaatccagcactttgaaaggccgaggcgggtggattacttgaggtcaggagttcaagaccagcctggccaacatggtgaaacctgtctctactaaaaatacaaaaattagccaggcgtggtggcaggcgcctgtaatccaagctactcgggaggctaaggcaggagaatcacttaaacccaggaggtagaagttgcggtgagccgagatcacgccactgcactccagcctgggtgacagagtgagactccatctcaaaaaaagaaaactgtactgaagtgatgctgtctataagacagaggagtaggaagtcccaagcactacccatggagacacagatttaataacactacatggaccaaattgtctttgtgggaaatctggcaaccacatcagaggtcagaactcttttgaaacacctgctcacctgaggccctatcctgccatgatgtagtatcactgtgagaaaaccacacttccattttctcctggggagagaaagtatgggaatatccatctaacattctgactttttttttctcttttttcctgtaacacaacacaaggctcataacgttctgacttttcagggcactgctaagggacaagtttctgtcttgcctgaatataaacactgaagtaacaggaccccaggtaaggaagctactgagaacaaagccatccgtcataaaccagagcttgtagtaacgtacgcagacattaggtggcggtgcagcccccagcttactaggacaccagcgaggctgcggaacagccggcagacaacagaggcattcctgcatacaaactggcacaagctctttagttaagctacaatcaaaaagtccacggaggacgcatccttagaaaaggcttgagggatctccagagcctctagtcaggatgactgtagcatgtcttccctgaaggaagccagaatcaaaaactacaagtggctgattagtgaaatgctgtggtcccaacaggagataacgagatatcaaaagaagccaggcacggtggctcacacctgtaatcccagcactttgggagccgaggcgggtggatcacgaggtcaggagttcgagaccagcctggccaaaatggtgaaatcccgtttctacaaaaaatacaaaaattagccgggcgtggtggcggatgcctgcaatcccagctactcaggaggctgagacagagaatcgcttgaacccgggaggtggaggttgcagtgagctgggatcccaccactgcactccagcctgggtgacagagtgagactccatctcaaaaaaaaaaaaaaaaaagcaaaagaaaaaaagaaacatggaccatatgcagcaacatattaaatcaccacaaagtaatactaaagaagcagatatatatatatatacattatcaaagaaataacaataagactcctaaagttgctcagtgtattaagacagtactcataaacaacttcagaaaatcagaaaaacaataaatatgagattatcaacaaagagataaaaattatgaagaagaaacagaaattctagagctgaaaaacataactgaattaaaaaacacactagagccaggcgtgatggctcacgcctgtaatcccagcactttgggaggctaaggcgggcggatcacgaggtcagaagttcgagaccagcctggccaacatgatgaaacctcatctctacaaaaatacaaaaacttagctgggcatggtggtgggcacctgtaatcccaactactcgggaggctgaggcagaagaatcgcttggacccaggagatggaggttgcaatgagctgagatcgcaccactgcactccagcctgggaaacaagagttgccacctcaggggaaaaaaaaaatacacaaaattagctgggtgtagtggcatgagcctgtagtcccagctactcaggaggctgaggtaggaggatcatttgagcctaggaggttgaaggtacagtaagctatgatcatgccaccatattccagcctgtgctacaaagtgagaccccatctctaaaaaaaataaataaaaggagaaaatgaaatagaagaatgatgaagatagccaggcatggtgatgtgtgcctgtaatcccagctactcaggaggctgaggcagaagaatcagctgaactcaggaggcagaggttgcagtgagccaagatcacaccactgcactccagctttgggtgacagagtgagactgcatgtcaaaaaagaaaagaaaagaaaagaaaaatgaacaaatgaacatagcctaagggaagtgtggaacaccatcatgtggtcaactccaatgtcaaagtaagaagaaggagtataagagaacttaacctactgtgtctgagtgagaaagaaaaaatctgtatactctcataagtagtaaggcaactggagcagcaatcaaaaaaaaaaaaaatcctagaacaaagaccaggaacacatgcataactcataagcactgtacaattctactcaatgttgaatgaagaattaacaattctcaaacaattccaaataagtgaagaagaggaaacaacaaaaaacaattgtatgataccacccttagtctgacaccacccaagcaaatatatgacaaggaaacaaaagtgtaagatattattcgtgataaacactgatgcaaaagccctcaacaaaatactaggaaaccaaattgtaaagacattaacaggattatagtccatgaccaagtggactacacactgggaagacaagagtggttcaacagaagaaagtcaatgtaatacaccacactgacatggtgaaggaccaaaaccacatgctcatctcaatcggtgcaaaaaaaagttatttgacaaaattcaacatagttcatgataaaaatgctcaacaattcgggcacggtggctcacgcctgtaatctcagcactttgggaggccaaggcaggtggatcacctgaggtcaggagttcaagaccagcctgaccaacatggagaaaccccgtctctactaaatacaaaaatttagccaggcatggttgcacatgcctgtaatcccggctacttggatggctgaggcaggagaatctcttgaacccgagaggcggaggttgcagtgagactgtgccactgcactgcgctccagcctgagcaacaagagcaaaactccatctaaaaaaaaaaaaaaaaaaaaaaaataggctcaacaaatcaaggaaacttcagaatattagatttggcaaagatttcttggctatgacaccaaaaggaaacacaatagcagcaaaaaaaaaaaaaaagggactgcatccaaccgaaaaacttttgtgcatcaacagatgctaccaagagtaaaacagtatgcctgtgacaagtcctagccagagcaatcaggcgagagaaacagaaggcattcaaacagaaagagggctgcatgcagtagtttgcacctgtaatcacatcactgtgggaggccaaggtgagagggtagtttgagtccaggagttcgagaccaacatgggcaacatagtgagactctgtctctattttttagcaacgacaacaaaaacaacaaacgaaaaggaaaaggaggaagtcaaattatctctctgagaaggatatgattctgtatctaaaaaaccctaaagattccactaaaagactcctagacctgataaatgacttcagcaaagtctcaggatttaaaatcaaggtacaaaaatcagcagtacttttttttttttttttgagatggagtttcgctcttgttgcccaggctggagtgcgatcttggctcaccacaacctctgcctccccggttcaagcaattctcctgcctcagccttcctaagtagctgggattacaggcatgcaccaccacgcccggctaattttgtatttttaatagagactgggtttctccatgttggtcaggctggtcttgaactcccgacctcaggtgatccgcctgccttggcctcccaaagtgctgggattacaggcgtgagccactgtgcccggcccagtcagcagtactcttaaacgccaataatgttcaagctgagaaacacatcatcaagaatgcaatcctattaaaaatagccacaccccccaaaaaatgactaggagtatgtctaaccaaggttgtgaactatctctatgaggagaactacaaaataccagtgaaagaaatcagacaacacgaacaaatggaaaagcatttcatgctcatgggttgaaagaatcaatatcaatgaaatgtccaaactgcccaaagcaatctatagattcaacagtattcctattaaatgaccaacatcacttttcacagaattagaaaaaacttctaaaatgtatatgaaagcaaaaaagagctcaaagagccaagacaatcctaagcaaaaggaataaagctggatgcatcacattacctgacttcaaaccatattgcaaggctacagtaaacaaaacagcatggtactggtataaaaacagacacatataccaatggaatagaacagagacccctaaaataaaggcccacacctccaaccaactgatcttcaagaaaatcaacaaaaataaacaatgaggaaaggataccctattcaataagtggtgctgggaaaactggctaaacatatgcagaagaatgaaactggatccctatctctcaccatataaaaaaattaacttgagatggattaaatacttaatataagacctccaactataaaaatcttaaaagcaaacctaggaaatactcttctaagactttggcctaagcaaggaatttatgaagacctcataatatatgcagcaaaataaatgcagcaaataaaaggaatttatgaagacctcataataaatgcagcaaaataaaaaatagacaagtggaacttaattaaagagcttgtacacagaaaaacaaactatcaacagagtaaacaatctacagaatgggagaaaatacttgcaaactacgcatctgacgaataactaatatccagaatctataagaaacataagcaaatcaacaagaagaagacaaatcaccccactaaaaagtgggaaaatagcataaacagacacttctcaaaagaagtcgtactattggccaacaagcgtatgaaaaaatgctcaacaccccgatcatcagagaatgcaaatcaaaaccataatgagacaccatttcataccaggcataatggctattactaaaaagtaaaaaaaaaacaacaaatattgacaaggcttcagaaaaaaggaaacacttttacactcatacacttatgggaatgcaaatttgttcagaccttgtggaaagcagtttggagatttctcaaagactaaaaatagaattacaattcaacccagcaatcccattactggatatgtacccaaaggaaaatagattgttctatcaaaaagacacctatattcatatgtttattgcagcaccatttacaatagcaaagacatggaatcaaccttggtgaccatcaagtggatcggataaagaaaatatagtagacatataccctatggaatattatacagccataaaaaaacaaaatcatgtcctttgcaacaacatggatgcagctggaggccgttatccctagcgaattaatgcacaaatagaagaacaaataccgcatgttctcacaatggcagctaaacactgggtgcacacaaacacaaagatgagaacaacagacactggcgactccaaaaaggaagaggaaggaagaggggaagggctgaaaaactatctatcgggtactatgttcactacttgggtgatgggatctttggaagactaaacctcaacatcacaaaatatacccatgtaagaaacctcacgtgtaccccctgaatctaaaataaatagtttaaaatgaatcaaataaaagtacgtaccaatgtacacaaaaaaattcaaatccatgagacatattctgtggaaaaatgaaattgtttttcctactataatctcagaaaatgcttctaaaatcagatgtggccaggtgcagtggctcatgcctataatcccagcactttaggaggccaaggcaggagtactgcttgagctcaagagaccagcctgggaaatacaatgaaacctcatctctacaaaaaaatcaagctgggcatggtggtgcgtgcctatagtctcagttactccagaggctaaggtgggaggatcacttgagccccagagatcaaggctgcagtcagctgtgatcacacgactggactccagcctggacaacagagtaagagcctctcaaaacaataaacaaacaaacaaataataaataaacagatgtatagttttcccctatgccagcaagcaatcaattgtgcagcagacaccgcctgggtatcctccaaccccagttcagtttcaataccatctacctggagatagtggcaaatcccacaggttgagggttcagtcccacttcgggcgccaacagcaagccccaggttgtttttcctgtgcttttgacagactgactattaatcagggttcctgtaactccctcattgggttcaattaatttgctagacctcacagacctcagggagacactttatgtacatttacccatttattataaaggatattacaatgaatacatatgaagagatgcatacagtgaagtattggaaaaggggttggaacttccatgccctccctgagtatgccaccctcaggaatctccacgtgttcacctaaactgaagctctctgaaccatgtgcttttgtgttttcatagaaacttcatgaagtaggcatgattaaaccattggccactggtgatcaacttaaccttcgtcgcctctccccctccctggtagctgaggagtggagtttaaagccccaatcttccaatcttgccttggatattctggcaactcaggccccatcctgaagcttgttggaggctgccagctatcagtcaatgcatcagcatgcaaaaagacaacacttaggaaactctatagattttaggagctgtatatgccaggaactgggtcaaagacaaaggccatgtgaacaatccactggtagataaagataaagcataccatttcatttcgttaaggccttccaaaataagataaactgaacaaataattgagaaaggggtaagcaacgaaagattatttttacagtagaataatgtgtaatcgaaaggaagacaacagtgcgtatataaagaattaaaccaagccgggcacaatggctcatgcctataatcccagcactttaggaggcacagtcaggaggatggcttgggcccaggagtttgagaccagcctgggcaacatagtgagaccctgtctctacaaaaaacaaaaacataaaaaattatctgggtgtggcagcacacaaccgtagtcccagctactcaggagactgaggtgggacaattgcttaggccaaggaggtcaaggctacagtgagccatgactgtactgtaaccaagtacgctcatttttctaagaaaaagggagtgagttattatttttttctcttattttctcctttccccattttcccctgttccctacttcctacttagccctttagaaatacacttataaccttttacctccccttcagcagacactctctacagggcaagttcatccaactatgtgcttcgagctccagaggggaatctcacttgccaggaggttacctcgagaaacagcaatcaatctacaacccaaagtcctgctacaaaactctctcccacccggagagtttcagccacttttacaacccagttctgcccacgaaggcaccagtggctgccagctcaaccccctggtacgtaaggcacagaagcaagttagggggacacccacctgctcgcttcctctccttagtgccattcatgccaagcccgccttttaaaagcgcctgctttctgctccaaaagcaatgcagtaccttacggcaggaagcctgtacttcttcccctaagctagctttggaataaaaagtcactgtctttctaccagaccttgctcttgttaactggactctgcaagcagcgagcaactgaacctgcatgtcagtgacagagccgccgtgctccggcctcgctccagcaacagggtgagaccctgtctcaaaaaatgtagtaaaagttaaaaagaaaataaaccgcagaatacaacacagctcctgaattccaggaacagaaaatggagcaaagtataaaaattcatttcatatatacacatccacaaagtaatgcaacccactcagactcacaaggaataagaaaatgaaaataaaatgggttgcattatccccgcattttcataatataaaatgaacacagtggcaagtttgcttaatgagggggaaatctgacgtggcattggtgggagagggcacctctgcacctggggtagggatagaatcttgccagatctagcaacacaggaaatgtgccatcctagaagagatcactcttccaatcgtccagcctggaggaactctccacgatccatagtgaagtcggcatggtcacaggcagccagggtggcaccttttttttttttttttttgagacaaggtcttgttctatcactcaggctgaagtgcagtggcactatcatggctcactgcagcctcaatctctggggctcaaatgatcctcccaccttggcttccacaagtgctgggattacaggtgtgagccaccatgcagcaccctgtgtggcattctttatagaagtgagaaagttaaaagatccacctgtcttcattcccagcatgctccaacaaggatgtagaaaagtgagctcctgtttcctaacacgaaaacatgtcaatgttcaaaacttgcaggttaacatatcacaaccaaacattcactgaggaatttgtttaaatctcataatgatgtcaaaatacatttctacaggacttgcactgacccttcccacagaattgagaacagtggctccccactaagatgtgagggagggtggaaggctggacaggaaaagggatgctttacctcttggcacataaatgtatcatttcactataaaagaaatatatacatgatgccatgttcaaaataaaagaaacaaaatgttgactcataactggtaaaacaaaaatacagttccattctctctaatggcaaggttgttctgcttatatgccattctcacctacaatacccgacggacaaaggttcttgtaagaacatcacagtctccatgggatagagcttctgagactagtttaatgaatcttgttacacatttatgttgacgtcatacattaaaatggatgatggaatgaaagaatcatctatctccaatgtcagtgtctaaactttccattctgttcccagtctttacgagtttggagtcggaaatccaatgactcacttgttcggcttcaaatgcagttaccaatgaggcaggaaagctttccccttagtgttcttttctatgccagtgagcaggtacgtgtgcacctgacttcatgggcagcttctgttatcatggtttacacagcgctgacagtgcatccagatgcggcccctgagcaatccctgctgcccaacagcactgacaccacaggaccctcaccccgtctccatccatgtctgggtgtgagcccttcccaggaccatgcccagtgcagcctcttcccaagttcatgtcactggatcacgggagatggaatctaaacgagatgagagggactgagggaaggcgcgggtgagtgctagcaaacatgtcaggcaggacgcttcagactcagagaagattcgcaatgccaatgccaggcatttcaggaagaaataaaagaacaatccaccaggagtatcactttacctgagtaagggccatccctgactccttttctttcctcttcctcttcttccagacttcttccttgggtaacataaaagagtctttagaagtcaatactgaatatccaaaatatgctgcttagggctgagaatctatacatccccttcatgtgccacagtcacacgcacagatctcaccctgtggaaagatggtcctctgcgccccactgcaccagggggaatacggggacgagaaactcctacaggaagaagtgagtttctgacccctttcttcagaacccaccttcctcctggagaagcccacacacactgcagcagtggggagctgggctggactgagctcccctttaggacacagacccagccctgaccaaaccccatgcagaacacagcccccctcacctctctgtggatcccaggctgagctcagccttcagaaacaaaagacagtgattggtactatgctggctacagaatagagtcaactttaaatattactcagctgggctctaaaacactgaaatgaaaatacgtcaagggggcacaagagatgtttctgcaaaacgcctaggcactctaatatgaagccagggttgagctccactgagggggtgagcccagcacagccccaccttctggctctgctctcctgttggggacttgttctcaccaggatccagactggatattgaaggagcaaaaagaatcacacagaacaggcaacatggaccagaggtgggggtgaaggtgggcctgcaatgtcaaataggaggctgtgggagatcacaaacgtttccacggaggaagtgatgtcagaacaaagacctcaggaagaaaggctgcttgtcacttgcagctgagaggccagggagttctaggcagagggccagcccacatggaagccttgaggcaggagcaaccttggctccaggaaaaggaaaggggcctgtgtgactggagcagagggggctgggaggacacaggaaggagatggcgtctgagaggtcctgagggtgcagatcacgcagggagaggtcttcaaacattctttctcccatacgtcaaaaaaatttatgaaaccatgtatttcctcacctgttttaagtaaatgcttaattttttcttcattttacaaagtaacacacttacaacatagtatcttgcatattttaaacatgacaagaagttcagctgagccccaggaagtacagggttgcccttagctgagatgtgcaagactgcaggggtgaatatgtttggaggagtttgggaagtcacttttatttaaataattaattaattaatttttgagagagtttcactcttgttgcccaggctggagtgcagtagcgtgatctcggctcactgcagcctccgcctcctgggttcaagcgattctcctgcctcagcctcctgagtagctgggattacaggcgcccgccaccacgcccggctaattttttgtatttttagtagagatagggtttcgccatgttggccaggctggtctcaaactcctggcctcaggtgatccgcctgcctcggcctcccaaagtgctgggattataggcatgagccactgtgcccagccaagaagtcacttttaggcatatgaaaatggagatgcctgttgggacatccctgtagagagttttggagacaactagacacaggattctagacctcagaggagggtctgcagggtacatggggctgagtattaacaggtggggcataaagccatgagatgagaagtacggaaaggcagtgggtgtggacggagacaagaagaggtgtaaggactgagccatgagcacttgcacattcagagaacaagaaagttctggagacaccagaagaggaaagcagaaagtgatcagagtggcaagaagattgaatagatttgtaaaggttaacggggtgtcataaaagccaagataacagaagaggaagtgatcagctgtgctacatgctaccgacaggaagaaaaagatgaggacaggacatgaattacggcatttaggaattgggaggtcactgatgactgaaaaaggaagaatcagtggaatgctggatgtgaaagctagattcaagcaacaattcaaaggtttaagcaataattgaagacaaagtggccgcacacggctcacgcttgtaatcccagtactttgggaggttgaggtggaaagactacttgagcccaggagtttgagaccagcctggccaacacagcaagatcctgtctctatatttttatttaaaaaaaaaaaaagaattgaagacaaagtaaaactagtttttagaatattatgctcttaaatagagcacaaataggtacttattacagagggaaatgtagttgaaagtatttttttgtcttaaagatggaagagtagaagaaaaaaaggctttatcatgcattggagatctgttcagagaggaaaaaaattgttcatactactctgacactctaacacagaatatttcacctctagtcaccaaaatgtgtgtcattgtccccacaatgacagcttctccagcagactcccaggtagggagtcctgctgttttactcaattctgacaccgtctacaaaacagaatcagacaccacagcttgagggttcagtcgcacaggactgccctcacttcatatgctgtacgctctgactgacctggtcaatgtgcttccctaacactttccttgggtttgaataactagctagcacagcttttccatctggctgttcatctgtgtcctttgcaacatactttataataaatgagtaaactaagtgttgtcctgagttcggtgaatgaccgtggcaaattactacaacctgaggaggggggtcaagtgaatccccaatttacagttggtcgcccagaagttcaggtcccaacctgcaacttgtgaccggcatttgaagtgggggtagccctgtggaactgaccaaccagtaaacagcatctgatcctaattctagctggacagtgtcagaattgagttgaagtataagttcacccagttagtgtcggatggaaaatgcattgctggtgggaagaagttcctccacattttggtgatgagttttctgtgtggagtgttcactattacattgactgtacactattatattgactataatcagcatcatataatactaaatattatgtaatcagtattacattaactcatgttctcgcccctacccaaccccatcccagggaaatggaggaagagcgtggcccacaaatgaatgagtcaagtcactgccctctggctgaaaaggttacaagtggaagctaacctctgatgccataattataaaatgcatagccttatagacaagttttgcaattctcatctttatctgtgtattttaagcatatttaaaatctgttagattataaagacagaaatcaacatgtcacaactaaattacccatattcaatcaactcaccactcacctgaaccaaggtcccctccttcttccttcctgtgtgtttccctctctcattctgtacatatctcatcctcaccttccctccctggctctttttttccgatgtttccccccaggtttctgctcctcattttgagcccctctcctctcctgctctttctccccttcttccctccattccttctcttccccctgttctgctccattcctacaacttcttccacctcttattcctttctgcccaaacttttcattgtcccaatcccaatctccacatatttctgcctctttcttccctcatctttgctccccctctgctccccctattaaatcccctcttccctgttacaccccttgtccccactctctggcacccccagatccaaagccttcccatactgtggttctccctctgctctccttgtcaccagctgtcccgtcttgctgtcccagcaccacattgctgtctgccctgactccaaattcctcctcctctcccccactctctgtctgaggagcctccccctttctgcccctctccctatcttgctgtccttcatctctctggagacccagcttttctctatatttctccagttgctccctgccccacactttctcagctttgtctttcactctcagtgtctgtctgcaaattccccacccatcctctgcgttgccatctgttcatggttctcacccgtccttctcactccttctcagtttttctatttcctctttctcctgtctctctttctcctgatcccctgtggccacatatttacagggaaggggatggaataagatgcccacctactgaaagcacttttcctagtggagtggaatctgggacaaaagaacattggaggtgaacagacaggcccaagtcacctccttcaacgctgggtcagaggaagccatgcttatgagggggaggcctgcaggatagagggcaaggctcaatgagagcaagatgggagggtgtctcaggggaggggtgggatctgtggaatcccaggaccagggcgaggactctcttgcaccggagctgcggtgctgctgtgcagacgcaatgaagggcgaggcttaggggacccaaagggtgaatgcacctcgcgggtgaggaccttacaaggcacagggtgggaagtgagtaaagggttttaagcaggaaatggcatgaaagctctctacatgggctgaaggcagaaatactgcaagcaggacctgtctgtgtggttcaatgggaagtgacccctgacctctcatggacacctctgaatttacttgggaatgaaagagccatgaggggatactaaggtctatagggtccggagtgacggctcatgcctgtaatcccagcacttcgtgggctgtaatcccagccgaagcgggaggatcacttgagcccacaaattcgagaccagctcaggcaacacagtgagacttcctctctactaaatatatataaaaaaaattatttaaacgtggtggtggtacacaccggtggtcccagctactcaggaggctgaggtgggaggatcgcttgagcccaggaggtccaggctgcagtgaactacaatcactcatatatacacatatgtctctgaggactcctgcaaatcgagtctggatgtgcaggagcctgggaagcccaagtttaacctaaacagagggaaactcacgtgtgaggtcttcactccaggtgatcagcttccagtggctgcaagaagagctgggtcccctgtaggcggggcccggggcaggcgcctcgtgcagagaggccaggagttgggaggtgcctgagggatgaagtgggcgggggacttggggaaagggggcggtgcctgcgctcccctccctctcactcccaggagtctgtttccagagctttggaggagagacctaccagcgaggctgaagccactcagtgggctgggagccgggatctctctaggtcgtcagggggcagtgttcggatccaggaacgtttctgcaattaaaattaagcatttaaagaaatgctgtaactgaatgagatgcaaactagaatgtgaaatgcaaaatttgagcttagcagggagtgtacaatttcatgctgatcagcagaacctcctttccatttctattccccgcgcactcaggaaggacagcgtcaacctcggttccagagcagggctaaggcctaggtattggttaggtcaataacttgctttttaaaaagcagtaactttttacaaatagaaataaattccattgttcttcctttatcccattccactcttgagatgacggcctcaaatacctttgagataaactttgtcattgtaatatgcttatgtcaataatctctacatatggcgtaatttgaaattcacttcacatgcattccaaaagtacttgaagaaacggaagagaaaccaaagaacatagattacaatatttaaataaaaattgttttctaagtacttattttaatctgttgtagaaaaaaagcctgtaaaatcatcttcagaaaacatttacatttatattcacctcaagggtaattaattttgcaagattttaagcgtatttgatagggtattttttttttcttttgagacagagtctccctctgtcgctcaggctagagtgcaatggcgcaatcttggctcattgcaacctctgcctcctgggttcaagcgattctcctgtctcagcctcccaagtaaccgggattacaggcacacgccactaggcccagctaattttttttgtatttttagtagagacggagtttcaccacattggccagggtggtctcaaactcctgacctcaagtgatccacctgctttggcctcccagagtgctgggattacaggcgtgagctaccatgctggctggatattctccttcatatgaaccctatacaaagtaaaactagattatcaaatattaaatggcatcgtatctactagcaataattttatggcaacatctgtgaatttacctctactttgaagtatgtttgcctctcacatccccacatgtggaagatttcatcaatggaaaagtggtgattaattgaaaatacaattgtttagacaggaaaaatagcatatttcacaactacatctacagtttcaaaagatatggtgtctgggatagatttggggacttttgcaaggtagactgctctgtgttacgcaatattgctaagtacctatgttgacaagaaagcagtttcagcatggacttccatgatcccaagcaaagaaatgatttgattttggatcttttcattaaattgagaatagtaggggtgaatctgattatagatgaaagccatgaatccattttgtatatgcagagtttaaatgcttatacattttcattgaagcaaaatcaacatattcacaagagatttaaaaaggatatttctggccgggcacggtggttcatgcctgtaatcccagcacttcactttgggaggccgaggcaggtggatcacctgaggtcaggagttcaaaacaagcctggccaacatggtgaaacgttgtctctactaaaaatacaaaaattagccaggcgcggtggcagcgcctgttatcccagttactagggaggctgaggcaggagaatcacttgaacctgggaggcagaggctgcaatgagccaagatcgtgccactgcactccagcctgggcaacagagcaggactccatctaaaaaaacaaaaaaaaagaagaaaggatggaagggggaggcttaacctttgctatctgctaggattacagggtcaaaatcggcttctacattgtcaacacataacaccaagtgaaactcaaaactaatgaacttgccctggtaccttggcctttgagactcggcactgaatccagcctgggcaacatagtaagaccccatctatacaaaaaaatttagaaattatccaggtgtggtggtgcatgtctatagtcccagctattcaggaggctgaagtgagtgtgagattgcagtgagctatgatcgcaccactccagcctgggtgacagagcctgtctcaaaaaacaaaaaacagaagaaaaaagctttgaagggcactcagccttcactgtgggtgtactgaatgttcctgtcacacataagagacatcattaactgctaaaggaaaatttcagctaattgaaaaaatgagatgcaccaacttcatttcaaagccatatacatttaaaattcccttacaattgtgtaatagatcaacaattgaaagataaggaaacaaggcattagtgatgcacatgctccaatgagaccccgatatcatacaaggtaacactccaaactattttatcttccaaaatgcatccgaaagcttcttgatctacaacacaaaatactccaaaataccaaaggtaacccagaaatttatctctgagattttccctataattcctctattttaaaaagtattctttatgtttaagggaatggttggcgacctaaattaccagataccgttcctccacacaccctggtccagggtccttgaaacgcccctggacctaagcccagagttctctttcttccatcccggtgcctggcaaatagaaatggaaacgatgttccgatcgttgtcactatgaaactgaacacagcacaagtagaaatttcaccttcgtttcatcctctaaacagacaaatcaggtcccggattaattaaacggttctaattgccagttccaggatgaaaccactgccccacagggaccatccgctgatgcccctgcacccctcctggtaccctgagctaagatgagttgtgatcctcttaatggtaggatgcctgtctccacctgcaaacaaaatgagtttttcacttaaatcgttttcaatgtaagagtaaaaaaaccttagccttcaattaagtggcccagtaccattctgttcttttgccttaaattgtttgaaatgttggattaactgaaaataagcaggaagcgtccctggactgaaaataagccggaagcatccctgcttattaactgaaaataagcaggaagcatccccggctaatttcaattagctgaaactttattttagcagtgcaatgctgttgatccagtcctagtggagagaaaggctgacatagcagaaaatgacctggggccaagaggagtagagagcccaggcccgctcctttcccggccctgcccgcttcccacagcccaggctgcaccatagcagcttccaccctcccatcccgccgccctcttccagccctttcccgttgcccagaccccagcccagggcgacttttacccttctcaccccaccccttccccactgcccaggccccgcccccacggtagtcccaccctcccaccccaccctcttccacccctttcccattgcccagaccgcaccccagggcgactttcaccctcctcaccccgccccctccccactgcccaggccccgcccacagcagttccaccctcccacacgaccctcttgcacccctttcccattgcccagaccccacctcacggtggcttccaccctccccacctggcctctccccactatccaagacccgcctctcgctggcgacagctccctcccagaatccgcttccagttttctcaccggcaggagagcattcaggcctttcagggcactccagccctgtccaaccacactcggaatccaccatcccaccagacgttaaaatccccaggtgcgctcatgggattggtagcgagtcccagcgtttccgcgggaaactctgagacccggtggctctgcagcttgtctatgatttgaaccctccccttgatttggagactggattgctctttttaatactcccagttggtggctggtgtgcttcccagctgtccgcaggtttgttctcatgagagatgactccagagtgtctagtctttgctttgcataacggatgaggaatacaaaatgtcttaatcttatgaatatataaattgtctgtttatgcacaatgttcagtcgtttattcactcatctcccgtggaatcctaagcacaattataaaagagtcacgttacatgagatcagcgtctaacacaaagcttctgtctcaataacagtaaataataatagcaacattaaatgaaatattagtattgctaaaatgggagtgtagtaaaaattaaataagtaaataattaaaaggaaatgatatatggtcaggtgcggtgacttatgcttgtaatcccagcactttgggaggccgaggtgggcagatcatatgaagtcaggagttcaagaccagctgaccaacatggtaaaaccctgtctctactaaaaatacaaaaaaatgacccaggagtggtggcacatgcctgtagtcccagctactccagagggtgaggcaggagaattgcttgaactcaggagacagaggttgcagtgagctgagatcgcaccactgcactccagcctgggagacagaacgagactccgtctcaaaataaataaataactgaatgaatgaatgaaatattaggccatttttatggtcttcactttgggagactgatgtatgcaggggtggactgcatgtttgtccttggggtggtctttttcgtgagaagggagctgagcaggactaactgaggggcagagccaagggcccttcatggagaccactctgcttaccaacctgtggaagggcaagcgcaagtccacccagaaacacatctggctgactatgggatccctgtctgaggctcagcagacccacgtggccaataaaagaccctaaattctgcaaaaagaagagtttgtctctgtgcccaggcccctccatggaaaaaaggtcctggggtctaagatttctcacttggcaatgatgttggcttgaatattattcacagacccagatccttgggtcttgcgtggggcaaactgactgcagaactgcaggaagtgagagtctgaacagagcagcagaaaggcaggcaggagacctgagggaggggagaaaggagagagacaaacagaccaacccgtcctctccctcaatcacccgcctggggaagcattagtttcccatcatagagaggacaacggggaaagggagaagcgtgtgcataggatgagatgtgtgttgggtggacagaaagactcctttccctaaatgtgaccccattagctcaccccattctattgcacaaattcctgagcggaggggcaccctgtggggatgaacacagctcttcctgcctccagttcctgcgtctccctgccatgaccagggctgtaaccctccaactcccttcccagggccccgtggcccctctgcactggagaaaggtccatgttccacagcgggtttcaaggaccttgcccctcagctccccagctgccttgtgactctgtgactctgttatcttggaataaacagggagaggccaccggcctggctgcaagaatgtggcagctttatcttcccaaggacagtcccagtggaagcctttgggccgcaggtcagtgtgctgtgtttcactctgattcttggagaaatctttcccttactctgggaccctgataatcactccctcttgagttgcacccacagacgcccccacaacaaaccctccctaatgaaagccatctgcgcctgattcttaggatccccgttgccctctggactcagacacgcttacaaactcccacactccccatatacttcataaagatcccacaatccccagatacttcataaagatccagaagccctgttatgaaatctcacaagccccagtaactcatggaataatatacacaaacaccccaggaactcactgacccagggcaacgtatttccactcatagtgactccaccccacaggggaataccactgaaacctaccaataaaacagagatgtctctaatgatgcaattagaccccaacatcaggaaaggaaacactccaaatgatcatttcatcttccaaaacacaactgaaagcttattgatctgcaactgaaaataccccgaatgccaaaggcaacccagaaaataatctctgagattcttcctatctttcctctatgggtttcaggatggtttttgcacttcccaaagcctccacagaaatcaccccgtggagcggatgctgtggagcagctctgggatccacaccctcaggccaaggcgcccatcctcctgctgctgaagctccctctgggctcagcttaggtcttggttctaagtacacttcgggatgtttttctctgcctgattccactgccttcagtcctcttcactgtgatgatgagtttccgaattaaattcctgcatgcaaatctctgtgtcagcatctgtttcccaggtaacctgagctgagacatcagggcattacaaaatgatcctgcagccccacaaccaccccaaaacccacttccaggtgctacagccagacctgagacttctttccaagtgtgccacacatcccgtgagcccacagtcacctgtgggccaggtgcatgcagcattcatccagctcctctagaggctcagcattgcttccacgcctcactccacacctctaaggacttcttcacctgtccccatttttctacttctcttccagcctgagaagcacactggattgaaaggcctctggacacaagcgatgcggcaggaatggacacaaactgctatctgcaggacagtgggcctcaagtctagattctagaagttggccatgctggaaggaattgcccccaatttggggacaccatggaatccagtttaaaggcaggtgaagattggccggattgagctggcggaggatgtccaagaaaaagagaggccccagatctcatgagggaggctgccattgtccccttgtctctccactcacagtcccctgcaaaattcccccgctgtttagggagtgcctccttcatggcccacttagcttctgaacttctcgccacccttcctgaagggaatccaggacccctgactgcgagcgcatcacctgctggaaggcaaagcccctgcccaggatggccaccgggccccggtgatgtgtagagcgcggaagacccgggagctggagtaaggcggtggggacgcctcggcactggctgaggacacagggtctgcggggcttttcaggcctcagtgaggccttctgctcttacatagactggaataaatagccacaggaagtttagaccaattacggatgaaatttccagaatatgagaccatcctcactacccgccctatccttttggtcttccctgaggactcctcagcccgaccccagccccagcatctgaaccacaaccccagagcaggtgctgcagtcgtcccgtggccaagatggagacacaaaacactcaaaataatccatgcagaagagtgtccgatgtggtgatggatgcggagacagtgaaacctgagtaacgtggtagagactgacaggcagagagaatttcagatgggggtgcaagagggtggaagacagctctgaggctagacccgaaggagaagaaagggacagagctgtgatgatttggggacatagggtaagaggagggacaaagactgagacaggaaaggttttgatgtttgggaaaagagaaaaacaaatgtgactagggcagagggagtcatgagatgagggcaagctcccaggaggaggctggacactggcaggggccctggacgcagggctgtggagccacagtgaggagttgggcttttgtcctggggaacacgggaagccggtggagggttccctaccagggactgacatgactgctttagatttagccataactctaatgcagagaaaggcctccaaagatggtctctctgcctctgagtctacaccccagcttccatccttgtggttttggttttgttttgttttaaattttaaaggactgagtcccatttaaatttttaattgcagtgggcactccccaattcctagaagaactgcaaaacacagatgtacacccaattctgccaaacattaaggggattagtattgcccagactgaggtatattgactgagtccctcaccttcacgttgcaggtggatttactgagggctagacggggagatgtttcactaagtcatccaagttgaattagaagatgtatctgactctatgacggcctcgaagggctaatgggcaacactagactttctcacgcctcccctggaaaattccaggatcttctttcacatacctgggcaaaagaaacttccctttcatggctttatcacattgatcccaaacatttaattcctcttttccagaaaaacacaacatactaatgaaacgcagaactgtgaaaacatggctattggtgttgaaaacagtgaaagactgtcagctatagagatgagctctctcagcaaattttttcatgaacacataagctctgctggaataaggttttgagtcaatccagcccatctttccacatttacagaaaatagaactgacaaaagggacttgagggggacatctgcttagtagttcacaggtcactattttaagagatgacataagggaagaaaactgactagtaacaaataagttggccgagcgtggtggctcacgcctgtaatcccagcactttgggaggctgaggcgggtggatcacgaggtcaggagatcgagaccatcctggctaccatggtgaaaccccatctctactaaaaatacaaaaaatttgccgggcgtggtggcggctgcctgtagtcccaactacttgggaggctgaggcaggagaatggcatgaacctgggaggcggagcttgcagtgagccgagattgcaccactgcactccagcctgggcgacagagcgagactccgtctccaaaaaaaaattagttaataggttcttatgttaacgttaaaaaaaaaagcgtcactgatatctttaccaaatacacattcataccatctaaaattcctactgatggccggcgtagtggctcacgcctgtaatcccagcactttgggagggatcacttgagatcaggagtttaagaccagcctggccaatataatgaaaccctatctctactaaaaatacgaaaattagccaggtgtggtggcaggtgcctgtaatcccagctacttgggaggctgaggcaggagaatcacttgaacctgggaggtggaggtggcagtgagccaaggtcacacgagtgcactacagcctgggcatcagagtacctccatctcaaaaaaaataaataagggccaggagcggtggctcacgcctgtaatcccagaaatttgggaggccgagacaggtggatcacttgaggtcaggaggtcaagaccagcctagccaacatggtgaaatcccgtctctactaaaaatacaaaaaattagccaggcgtggtggcacacacctgtaatcccagctagttggaaggctgaggcaggagaatcacttgaacccaggagacagaggttgcagtgagctgagatcacgccactgccctccagcctgggtgaaagagcgagactgtctcaaaaataaataaataaataaataaaaatgaataaagttacctactgactaccaaagagtatttccaatatatgataaagagtagaaagcatgcagacctcaatctgaactcaacacaattaacttcaaatggaaaccattttgaaaatatatatattatttaatatgtatatgatatattaactatatatggaattctacaaagggaaaaaattgaaaatatatcacatttagaaaagaatgacatgagccaatacaggattccacaaaagcttacttcagcaataattacatatagaaaaagagactgaattagataagcttcatctcaaccttcagcatgaactgtgagatgaaaggtaaatacaaggcaccaggcagtgacacagccagtcactccttgcctctcttcactgcccccaccctaccccatcctcggaaacaggaagagggagacccataactgaatgaggcaagtcactgcccaatggctaaacagcatgggcaaatgaaagctagcctcttatgccataattgtaaaatgcacaagccttttacacagagctttgtaattctcatccttatatgtagaatttaaacaattagattacaatttaaatgtaacacattataaatagagaaatcaaattgtcatatccaatctcaactcacctctcacctggccccagggcgcccctctttctttataactatgtgttcctctcccccattttgtgcctctcactttcaccttgtctctccagcctttttccccttttatcttccccctaggattctgacgatgttgtgcctcttttttcttctgctgtttctcccttctttgttttttccccttatatctgttctactccattcttccaatttgtttcacctcttgtggcgttttctttccaatcttttcatcgtcccaatctccatctatttctgcctctttcttaccccatctccgcgcctcctctgctctccctgttaaatcccctcttccctgttacacccgcttatccccactctctggcactcccagatcccaggcctccctgtgttgtggtgctccctctgctcgccttgtcaccagctgtcccctccagctgtcccagcaccacgcagctctgtctgccctcggccaaatcctttctcctctcccccactctctgtctgaggaggctccttctttgctgtccctctccttatcttgttgtcctgcatctcgggacatcgagcttttctctacatttcgccaattgcttttctgcccctgctactttcttgactgcttctttcactctgtcgctgcaaatctctcacccatcctccactttgccatctgtttatgggtctccctcatttttcttttctctttcttggtttttccatctcctctcagtggctctttgtctctctttctcctgattcccttgggccacacattcactggagggtttgtagtaagatgtctgcatgttggaggagtacattttccagggggtggagctgggcaggcaaaaacaccgggtgtcacaggacgggccccgggcacctccccaacgagggctcaagggaagcggtgactgcgaaggggaggcctggggagcagcagggcccggcacgaggaggagggaggtggggggcgacggcgccttaggacaggggtgggatgtgcaggatcccaggaccaggcggaggcgcggcctccccgggactgggtcggcggcgctgcgctccaggggccgacgagagcgaggctgggaggcgcccagggcaggcggtgaggactttaagcgatgcggggcgggaggaggagtcagtaaaggattttaagcaggaaaatcctgcttaaacgtttaaaaaaccgggaaaggccgtgtttacttggcccaaggcagaaagaccgggggcagggaccagcctcagggcgactttaacccaaaaggaagcgtctccgggcccacacagcaaggcctatttacctgaggtggagggtgcggtgcggagattttaagtccgtagcgacccccgggcatcgggtgtgcgaatgggggacggcgaggcgcaggttgagtctacacagaggaacactcatacgccatggtgtgatgcttgctccgcacgatccacttccgggtctgtgggcaactgcgcgaaggaaagcgaccgagcggcccggggcggggtccgagatgggcggaaccggaaaagggcggggcgttgagagagccgggctgaagcaggggccgccaggcagggaccccagggaaggaacggggaggagccaccggggaggggtggggagtgaccaagtggagggacccgggggcgggccggggaggagccgccggggaagggcggggaggaaccgcgggaagggaccgcgggggaggaaggcgaagggaccgcgggggagggaggcagagggaccgccaggaagggacccgggggagaggcggggctggacgggacacgttagggtctgcgatttcgtgtgatgcccacagcccagcgcccagagccatctgtagtgtcttgtggaacggcgtagatgtttcaaacggtttcaagttaaaagcacagttgtgtaggttattttggaaaccaaactgctttcctcttagaatggaggcggtttatgttgaaagcattttttgctagcgcgtttacccagtaatgttattgacgctgaagcagcccaggagtctgggaacatgggttgacacggagcggtgatggcatgctggaaaagtttctgcgattaaaattaagtaatttaaaagccctgaaattagcagtaacttttaaaaaatagatataaattgcattgtccttttttatacttactattctattccgtgcgagatgacaacctcaaacgcctatactttttttttttttttttgagccggagtcacgctctgtcgtccaggctggggtgcagtggcatgatctctgctcactgcaacctcggcctcccgggttcaagcaatgctcctgcctcagcctcccgagtagctaggattacaggcgcccgccaccacgttctttagcggagatgaagtttcaccatgttgcctaggctggtctcgaattcctgacctcaagtgatccacccgcctcagcctcccaaagtgctgggattacaggcgtgagccaccatacctggccccaggaactactttcacctactgaatatatattaagtcctttgccacaaaaagataatatacataatttatctcagaacaattaagatatttaccactgtaaatgacaaattcagacttagagaaggaagattttattcaaaaggactattgcaatagagagaatgttccaatcacaagatctgaaaatgtccaagagacacaaactaaaaagcttttttttctttttttcatatatggaggagtaaacaaggctagaaagcacaagcacaagttatgaggctgtggatgagcacttggcatgactacagttattcagggaaagtttgttatgttatgttatgttatgttaaaaatgttacatatttcttggagagagtcttgctctgtcacccaggctggagtgcagtggcgtcatctctgctcactgcaacttttcatctaccaggctcaggcaatcctcccacctcaatctccccagtagctgggactacaagcacacgtcaccatgcctagttaatttttgtactttttgtagagacggggtttcgccatgttgctcaggctagactcgaactcctgagctcgagggatcccccacaccttggcctcccaaagtgctgggatcacaggcgtgagccaccgtgcccggtctatttattttttgagagagcatcttgctctgttgcccaggctagagtgcagtgtcaagaccatagctcactgcagccttcaactctggaatcaagtgatcctcctacctcagtctcccaagtggctgggactacgggtttgcaccgccacactccactaatttttttactttttgcaaaggcggattctcactatgttgcccaggcaagtcttgaacttctagcctcaactgatcctcccgccctgatctcccaaagtgttgggattacaaatgtgagcctggctcatcatggaattcaagaccagtttgggcaacatagcaagactcccatctctacagaaaatttttaaaaattagctgggcatggtggcacacacctgtagtcccagctactcaggaagattgcttgagcccaggagttcgaggcagcagttagctatgatcctgacactgcactccagtctgggcaacagagtgagaacctgtctttcaaaaaaaaaaaaaaaagcctactcttgggaggggctgttggctgttgttaaggaaaagttgttccaaattacactgacaaagaatggttcagagggttgggcatggtggctcacgcctgcaatccttgcactttgggaagctgaggcgagtggatcacatgaggtcaggagttcgagaccagcctggtcaacatggcgaaaacccatctctactaaaaacaaaaattagccaggcgtggtggtgcacacctgtaatcccagctactcaggaggctgaggcaggagaattgcttaaaccagggaggcagaggctgcagtgagccgagattgtgccactgcacttcagcttgggtgacagagcgagactctgtctcaaataaataaataaggctgggcgcggtggttcacacctgtaatcccagcactttgggaggttgaggcgggtggatcacgaggtcaagagatcgagaccatcctgaccaacatggtgaaaccccgtttctactaaaaacacaaaaattagctgggtgtggtggcctgtccctgtagtcccagctactcaggaggctgaggcagaattgcttgaaaccaggaggcagaggttgcagtgagatgagatcgtaccactgcactccagcctggcgacacagtgagactccatcctataaatgaatgaatgaatgaattaataaagtgaattagttatcaaaaacctcaaaaaagaaaagtctgtagctgggcatggtggctcacacctgcaatcccagcattttgggggaccgaggcaggcagatcccttgagatcacgagtttgagaccagcctggccaacatggtgaaacgttctctactaaaaatacacaaattagccgaacgtggtggtgggcgcctgtaatcccagctaccttggaggctgaggcaggagaatcgcttgaacccgggaggcggaggctgcagtgagctattgtgccactgcactccagcctgggcaacagagcaagactccgtctcgaaaaataaaaattaaaaaaaagagtgatacagctttcatggtgtaaaataactttcttgggattttcattatattcacataagtatcctgaggcagggtatgggcggggagaacaactcaagtgcactctgtaagtgtatgttcccaacactctatttaattccaagaaaaaaaaaaatggttctatctttcagccttaagagtctaatggtgtgttgttattgtctgttacaaagtaacctactgaggtgggataaaactatgttggcagagagaacatgatgcattcatagttatgcaaaaatcagattaattagcacgagatctatgatacattctgaataaaacagtagcaaaatgtaataccagcagtaaatgtgaatcctaatcaataacatgctattgtggttcatctctgaggttgtggtttctattgtggtttcaatcttggctatataacagcgatggccattccatgcagaaggtggccaccgttttcccctgaattatttccaccatgtaatcagtcactaataacccattacactcctcccacaaatcccagtgtctaaggtcttgatctgctctgattttttttgaggcacagtctctctcagtcacctaggctggagtgcagtggtgcaatctcggctcactgcaacctccgcctcctgggttcaagcgattctcctgcctcagtctcccaagtagctgggattacaggcgcccaccaccacgcccggctaatttttgtatttttagtagagacggggtttcaccatcttggccaggctggtcttgaactcctgacctcatgatccacccacctcagccacccaaagtgctgggattacaggtgtgagccactgcgcccggtcgtggtctgctctgtttcatggtcaggttgcaggtcatctctttcctgtaacccaaagtgccgtctatcaggagaacaccctaaacacaataaggatgatgatcaacaccatcattttgcattattctctgcctgcccccatgcttggtaatttgccaaggcagagtccttattcttcaaagaatctgaatagaaatgatcctcatctaatgcagtgagcccttccatcttactgattctttcccagacattgccatgaaaggcaggtaaggaggcctatcaacacatttcaaggttttggttgaaagtcataaatcctaaagtataaagtagtagccttgcaagacacctaaaataaataaataaaatattttaaaatctgagacaaccagtgacttcaaacatcctgcaacctttaatatatatcatgttgtgtgagttttaacatatttgggcttgcatttgttctacaatgtgtaatatgaaaagtttatcagcacaactagactgaattattcctcacataaatccttggatgtgttacagttttgatccttggttaatagcttcaacatgcacaaaatatacaaagatgtttacacattttgatgtctagtgagttgtgagacctaaatgaagcctctgccacacagttaggtgtatatgatttctctttagcatggactctgatgtcaatgaatgcttgaacttgtgatgaagggtttgctgtactcgtaaggattctctcaagaatgaaattctctgatgctgtgtaggagtgaattgtgactgaaaaccttgccacatttattatacttgtatggtttctctctgatataaattctttgatgactcacaggatttaaactttgactgaagaccttgccatattaatttcttttataaggtttctccttagtatggataatttgatgtctgaagaggtttgggcgcacactaaaggacttcccacaatcactacatttgtaaggtttctttccagtatggattatctgatgtctagtgaggtttgggcgcacactaaaggatttgccacactcattacatttgtaaggtttttctccagtatggatgacctgatgggtagttaggcttgaatgcacactgaagcctttgccacattgattacatttgtaaggcttctctccagtatggatgacctgatgggtagttaagttcgaatgcacactaaaggctttcccacactcattacacttgtaaggtttctctccagtatgaactctccgatgactcgcaaggtgtgaattgtaactgaaaaccttaccacattcattgcatttgtaaggtttctctccagtatgaattctccaatgccttgcaaggcttgaagtctgactgaagactttaccacattcattacacttgtatggtttctccccagtgtgaattctctgatgagttgcaaggcttgaagtctgactgaacaccttgccacattcattgcatttgtaaggtttcttgccactatgaattacctgatggttggtaagtgttgacctcacactaaaggctttgccacactctttacatgtgtaaggtttctctccaatatgagttttctgatgtagtgcaaggcatgaatttcgactgaagaccttgtcacactcataacatttgtaaggtttctctccagtgtgaactctccgatgtagtgcaaggcatgagttgcgactgaaacttctgtcacattcattacatttgtatggtttctctccagtatgaactctccaatgacgcgcaaggtttgatttttgactaaagaccttgccacacagatcacatttatatcctttctctccagaatgacttacctgacgtacagtcatgtgtgagccatgattcaaggctttgtcgcactcaatatatctgtaaggtttttccctaatgcatgatttctgttcttgtgtgagtaatgaagaacagatgaaatcagtcccatatttattagaaacatgggttttgatggtagaagaaattatttggggtggtgaaactgaggaaccatggttgacagacttctcaacatggttacattcataaattttcccttcagcttgaaactgctgcagttcatggggatgtggtagaaagcttaatccaagctgatgtttaatagacttgtttcctatacctcttctatcgcgttggtctctcctacaagtaagattttcttttggggccgtagtcactttgttgcaatttctttcatcatctctccactgacagtcaaagtcgtgtatttttttcttgatttccctgaagcaaaactcttcaatgtcatgtttttcatgttgttccaatgtcactgtgtggaatacttctcctgggttaccttcctgttgtggtgctagttccttgattacacagttacgagacagatctataagaaatgaaaaccataggtttccaattaattagagacagtatataaatatttcatactgaataacagaattacacaaaaagcaacatttatatacaacagagttataaaacttcccaatcatgatctttaatttttacgaacacaaaggaatcacattctttagtaaaaaaagggtgattacatggcattcaaataaattctagggaaggacagattcaaacatcctatgaccaaaacacattgtacaaacctacgttagccctgaaaggagtattttttcaccttgacagcaaagtacacaccaattggcagaaaatacatggctgtctcattattgaaataaatattacattttacctagccacagcatatttactgtgcccatataaatgaaaaaagtactacacaatatatcataatggtaactaagccacaacaaacttacggaataagtaagatacataaatgataattctgaattgcaaaacagtaatagcactgagaaaacgagacaaaaactaataaaacactgttaaaaatagctaatttttctgaatacctgttatgaaaatatctgtacccacctagaccaggcatttttgacattaatgagtgatgcatgtcagttatattgcatgaaacttactaaaaacccatcatctgtaaaccataacaattaattaataaaacactgtagtaacccatgataaaaatgcaaaccaaaaactagtaactacacttgtacaaagttatagcctgtaaatgattctctcctaagaaaaaagcaagaactatttcagaaccagcacacaacctgtgaactggaatatatgttaagatctctgacatttgatgcatgaggtcaggtaaacacatagcattataaagaagaattgaagaacaaagtcagaaatcacaattatgacttcacacctgcacttatgtaacaaacagccagtcaataacgcaattccctacatatgcattgccctttcatgacctagttcatcagccacacaatatacataagagtttgtacttggaaaatttattaactgaaatcagagaacacaatgtttaaaacgaattgaaaataaaatcaaacaaaatataatgcagtctctacggtctgaatatgttggccaaaattcgtatgctaaggtcctatcctccagtgtgatgttgttgcagatggcgcgtttgggatataattaggtcatgaggttggactagtcaaaaataggattaatgcccttacaggacaaaacataagagcttgttttctcttgccctttccatcatgtgggacagtcagcgagccagtaccaggaactgattcacctggctccttaattttgacttcccagcttccaggtctgggagatataaatttctgtggtttagttctcctagcctatgatatttctttttttttttttttttttttgagacccagtttctcttgtcacccaggctggagtacaatggcgcaatctcggctaactgcaacctctgcttcctgggttcaagcgattctcctgcctcagtctcccaagtagctgggattacaggtgcctaccaccatgcctggctaatttttatatttttagtagagatggggtttcagtatgttggccaggctggtctcgaacttctgacctcaggtgatctgcccaccacagcctcccaaagtgctgggattacaggcgtgagccactgcgcccggcccgcctatgatatttcttatggcacgatgagttatataagacagaaaaaggacaatctcatcacaatcatcacagaaggctgatcaatcttattaaacaaactttgggactttactgtaagacatgcaatattccaagtaatcacacaccaccaccttgttttaaaaactttcaagtaaattgttattatttttcaaataaacacattaggcccatggtattcatgtatctaacctaaattttcacagaaaataagagagaaaaacaagactaaatcctgggccagcaggctcagacttttttttatttttatttttggagacacagtctcgctcttttgcccaggctggggtgcagtggtgtgatctcggctcactgcaacctccgcctcccaggttcaagcaattctcttggctcagcctcctgagtagctgagattacaggcacctgccaccatgcccggctactttttttgtatttttagtagagaaggggtttaaccatgttggccaggctggtttcgaactcctgacctcaagtgatccgcccacctcagcctccaaaagtactcggattacaggcgtgagcaaccacgccgggccatcagacgtgtttttaagcacatgtccacccacaggcagtgtggaaaacctgggtggacatgtgcagtgtggaaaactatcagtcacagcaagaatgcacccaggcgaggagcatatgaagaaaaggagctacaagagctgggctgtgttgataatagtgttattcagtcagctctcatggaaggcagctatgctcaccactacaccaccaatgcatctagtcagtcagctctcatggataatggtatctgagtcatcacttcctacacatactgatttaggcagatcctgacttataaagcggttgagtagtgtcttgtcttgcatagtgagagtagtgtggagggtgaggaagtcctgtggcaattggggttttcaggaatacaaaaccaatatgctaaaaagcaacagtatattccatgcagatcaaggtatcatgtgaggataggagagaggaagggcaagagcacaggagagggagtaatgggcatgtcagaggaaaatctgcatgcacatgtgtgggatataattccactaggacagttacaattctgaccttggggccaggcgtggtggctcacgcctgtaatcccagcactttgggaggccgaggcgggtggatcacatgaggtcgagaattcaagaccagcctgaccaacatggagaaactctgtctctactaaaaatacaaaattagccaggtgtggtggtgcatgcctgtaatcccagctactcaggaggctgaggcaggagcatcgcttgaacctgggaggtggaggttgcggtgagctgagattgtgccattgtattccagcctgggcaacaagagcgaaactccatcttaaaaaaaaaaaaagtatcataaaaaatacagaatttacgactaaatgaaaaagatgttcatttataccacatgtaaatgtacaagatgaaactagtagtggcttaaacaaatgacactggactttaaaaaccgaggcattggccgggcgcggtggctcacgcctgtaatcccagcactttgggaggccgagacgggcggatcacgaggtcaggagatcgagaccatcctggctaacacggtgaaaccccgtctctactaaaaatacaaaaattagccgggcatggtggcgcacgcctgtagtcccagctacacgggaggctgaggcaggagaatggcgtgaacccgggaggcggagcttgcagtgagtcgagatcgcgccactgcactccagcctgggcgacagagcgaaactccgtctcaaaaaaaaaaaaaaaaaaaaaaaaaaaaccgaggcattacagcagtgtaaagcaaaaaaagaacaaacgaaaaaaaaccaaggcatcattcagcttcacaagctccctccacaagagggaggtttgaacctacaacaaattgaacccaggctgaacaaaggtttgttgatgagaatgaacaatggtgcacacaggatggaaaatgaacaaatgtggtgtgaacaatagtttagtcaagagcctcatacatatgatgctgtgaacttgaacaatgtcatcgctaggagaaactcccacaccaactgctggcttaggggagatgatcattagtttatgtgtccagcgctgtcacagtgccctccaggtacacttttgtgaggctcctcaaaactagaaggacatctggacacacttgtcagtcaggctcgcctgatattttgtatcttatatcctgagccatgctgacaattctgctgaacgctttaaggggcatctctacatgtagcaggatgctattcaattatattaaagagttttccctcataaattttctgttatcatataaacaccctccacaagagactccaggagaaggtatgcataacctataggttggttatcatagcaggaatagagaaatgacagactccaggagtgtgtatatcaaaagctgggtttgtttttttttgaaacggagtctcactctgttactcaggctgtagtgcagcggtgccatctcagctcactgcaacctccgcctcctggggtcatgtgattctcctgcctcggcctcctgagtagctgggattacaggtgcatgccaccacacctggctaacttttgtatttttagtagagacggggtttcaccatgttggtcttgaactcctgacctcaggtgatccgcccacctcagccacccagagtgctggaattacaggcgtgagccaccgcacctggtcaaaagttggttttcagaggaaaaatcatgcaaacttaagagaaaacaaaatcaggaagagccaaggtttttccacattcatatagcagtgagaccaacggaaaagagagaaaaatacaacatatgaggctagattttgaaagatcttgagatgggattgtctgctctgcctacagagggatcctaagctaagagcctgaaagactaagacgtactccctgtgtaggacgggggatcccagtgaagacctgtcaactgttcttacagttctgcagagtaacaatcccagaagaaccaactccctcccctggtccacacacccacgaactgtggcaaaagcagaacagaagaaatggctgagggaccacaacaggtagaaagggcttgagacagctccttgcagctccccggggcctcagatgcaaagaaggagcagccagtgtttcccatcttgtgggcaggtcttccaagcaccagaaatggggtggagcatggatagctccaggcatcaggactgtggaggcctcccctctgatctatatggagagcgaactgagcatcaggtggcatcaagaacaggagagaccggccgggcgcggcagctcaagcctgtaatcccagcactctgggaggccgagacgggcagatcacctgaggtcaggagtttgagaccagcctgaccaacatggtgaaactccgtctctactaaaaatacaaaattagccaggcatggtggtgcatacctgtaatcccagctactcgggaggctgaggcaggagaatcatttgaatccgggaggcgaaggttgcagtgagccgagattgcaccattgcactccagcctgggcaataagagcgaaactccatctcaaaaaaaaaagaacaacagcaacaaataacaggagagaccacgggagaagtagacccttgtgatgtggcccctcccggacccctcagagtgaaggagccagagagttcacggaagtcagagggcaatgctgtccatcatgatgagcacttccatttgtctctgtttgagctgcagcccccactggacagcaaaaggatcaactatgacacgtctcaagagcagagggagaagtaggggaagtttaaaatttcctctaagagctcacaggatataaacatttgttttcctacagaactctcccacttgctaagagtttccaaacatagtgtaatggtgtggcttcctctcccctcatctgaggtcttacctgttttcacacctttgatccattcccacccttttggttttcttgctactcgtacttggctttctatggtccagggctctttcctgtgctcccacataggataatactctggtcaggaagagaatttcccgcttataaaatgaatggaacatgatgtgctgtggcttttcaagaatctcagccctttgcttggataagaagagaggctatcacagatggatctaggaaaatatttcacaaattatttcactgaatgccaactctgaatgcttagggaagactgtaatatgcaaatatctagctcccttccaagaactactgaatcaaagcacaggggcagaaaacaagaagtgagtatttcagaagtctaccataagctttcatggatacttcagctctggaaccaccactgttgtatcatgaaggggtcagaaaatctggaaaaaggggatggttaaactccagagttcacattatggagcttttcatttcagagtcaacaaggcctcaaactcagtcaggtaatgcaggggctcccaagaggcacacaagggaaaatggaaagataccaagggcagattttgacttctggaagaaaattatcctcacccagggagaccaggttcctgtagttctccaacatcacatccctgtataaagtcctctgtgtagagttcaggcatttccactcatcttgagagaattcgatggccacgtccctgaatgtcaactgtccgtaaaataataaacacatttcaccaagaggttatgaagggagttaccatcttcacacaaaataagaataaaagagaatttaagtatagatttaattgaagtgtgtgttctgataaatccacactaaggtatttttgagtacatatctctccctaattgtggttttttttctctctttttttttttttttggtttgagacaaggtctcgctctgctgcccaggctgaagtgcagtggcatgatcatggctcactgcagactcaatctcccaggttcaagtgaccctccaaccttagctttccaagtagctggactataggcatgtgtgtacaaagtacatttgaaaacttcaacaatgaactagggatcaagcaaaagaaaaaatttcagaacttgaagacaggtcttttgaaataaacgagtcagacaaaaataaagaaagaaataaaaaagaatgaacacagcctatgtgacatatggggcaggcaccataaggtgaccaaatatttgaatttttggtgtcccagaaggtggagagaaaatcaaaaaagatagaaagctatttaacaaaataataaccaaaaacttcctaagtatagtaaaaggtttagatatctagatacaggaatttcatagattctcaaagagatacaatccaaaaatgtcttcttggcacattatagtcaaactgtcaaaagtcaaagaaaaagaaagagaattcggctgggcgtggtggctcacgcctgtaatcccagcactttgggaggccaaggtgggcagatcacctgaggttgggaggtcgagaccagtctgaccaacatggagaaaccccatctctactaaaaatacaaaactagccgagcgtggtggtgcatgcctgtaatcccagctactcgggaggctgaggcaggagaattgcttgaatctgggaggtggaggttgcggtgagccgagatcacaccattgcacttcagcctgggcaacaagggcgaaattccgtctcaaaaaaaaaaaagaaagaaagagaattctaaaaaaaaacagcaagagaaaagcatctagtcacttataaagggtgctccataaaacaggaaatttctcaatagaaaccttacaggccaacagagaatggtatgatacattaaatgtgctgaaagaaaaaaaaaccctgccagccaaggatactatactcagcaaaattatccttcataaaaaggagaaatagtctttcccagagaagcaaagcctgagggaattcttcaccactagactggccctacaagaaatgcttaagggatccctacatctagaagcaaaaggacaatattggccgtcatgaaaacacacaatactataaaacccactgttagagcaaacatgcaagtaaggaaaggagtcaaatgtaaatgttactattatagaaaaccaccaaaccacaatgaaaaacaattagagaaaggagcaaacatacaaaacaaccagaaatcaattaataaagtgacagtaataagccctcgcatatcaataatgaactttatgtaaatggattaaactttccacataaaagatatagactggctaaattgatacaagcgtgtaacccaactatatgctacctttaagaaactcatgtcaatgtaaagacacaaatagactcaaagtgaaaatatgaaaaaaggtattatatgcaaatgaaaccaaaagcaagcagaagtacctctacttcaatctaacaaaatgaattttaagttaaaaacagtaaaagagatgaaaaaggtcattatatactaataaagagatcaattcaataagaggaatataacaattctaaacatatatgcacccaacactggagcatccagacatatagggcgaatattattagatttaaagggagagacacaatccaaaaataataatagttagggatttcagcattagacagctgatttagacagaaaattaacaaagaaacactgaatttaaactgcactttagactaaacagatctaagagatatttacagaacatttcatccaacaagtacagaatacacattctttgcatcagcgcatagaacattctccaagacagactacatattagaacacaaaacaagtctcaacacatttttaaaatatcaaaatcttagtatcttcttagaacaacaatggaataaaattagaaatcaataccatgagaaactttgaaaactggcaaatacatggaaattagacaacatgctcctaaatgaccactgggtctaggaagaaattaagggggaaattaaaaaaaaaaaatcttgaaacaagtaaaaatggaaacacaatatgtcaaaacctatggaatacaacaaaagcaatgctaagagggaagtttatagtaataaacacctacttggaaaaagtagaaaaatttcaaataagccaggcacggtggctcactcctgtaatcccagcactttgggaggccaaggtgggtggatcacctgaggtcaggagttcaagaccaccctggcgaagatggtaaaaccccatctctactaaaaatacaaaaattaggccgggcgcagtggctcacgcctgtagtcctagcactttaggaggccaaggcgggcggatcacgaggtcaggagatcaagaccatcctggctaacatggtgaaccccgcttctactaaaaaaatacaaaaaaattagctgggtgtggtggtgggcgcctgtagtcccagctactcgggaggctgaggcaggagaatggcatgaacccaggaggcggagcttgcagtgagcccagaccgagccactgcactccagcctgggcgacagagggagacttcgtctcaaaaaaaaagaaaatacaaaaattagccaggtatgtgcctgtaatcccagctactctggaggccgagatgggagaatcgcttgaaccagggaggtggaggttgcagtgagccaagattgcaccactgcactccagcctgggtgacagagcaagactccatctcaaaaaaaaaaaaaaaaaaaaaaaaaatttaaatagacagtctaacaatgcacctcaaggaactaagaaagcaagaacaaatcaaacccaaaattagtagaaagaaaaaaataacaaagatcagagcagaactaaacaaaataaatactacaaaaacacaaaggatcaacaaaatgaaatgttggttatttttaaaaaagataatataatctataaactactagctagattaatcaaaaagaagacccaataaacaaaatcagaaataaaatggatacgttacaactgataacacagaaatataaaagatcatcagagactattataaataactacacactaacaaactagaaaacctagaggaaatggataaaatcctggacacgaagcaccaagactgaatcaggaagattcagaaaaccttaacagaccaataatgaaatttaatcaggaataaaaagtctctgaacaaagaaaagtctgggaccaaatggcttcactgccgaattctatcaaactttcaaagaagaactaagactgattctcctcaaactaaaattgaaacggagggaattctccttaactcattctatgaagccagcattcccgatatcaaaccagaaaagaaaaaaaaaaggaaaactataggccgaaatccctcctgaacacagatgtaaaaatcctcatcaaaatactagcaaattgaatattttgctatattcccaacacataaaaatgataaatactcaaggtaatagacacttcaaataccattacttgatcattacacattctatgacacacgtaacaaaatatcacatctgccccttaaatatgaaccaatattatgtatcaacttgaaaaaggagcaagctatccttgttccttaatacgaaaacgtgtaaatattcacaacttgcaggatagaataccctaacaaaacatttactgacaatattgttctaaaatctcacaatgattaaacacatttcaacagggcttgagctgtctgttctcacagaactgacaatagtggctcaccactgagacctgtgtgagggtgtaaggcttgacaggaaaagggatactctatatctaagcactaaatatctctattgagagtttcaccataaaacaaatatatacatcatgtgatgtttaaaataaaagcagcataatacttaataacaatacatataataagaatatggatatatcctctttaatgaaaaaggagttctgctctgatgtctgagcaaaactgttaccatttttacctaaaatatctgatgcctaagagaccctgcaggaatagcaccatctccgtggtatgcaagtgctgagaatggtttaaaaacttggctgggcgcggtggctcatgcctctaatcccagcactttgggaggccgaggtggatggatcacgaggtcaggagttggagaccagcctgacctacacggtgaaaccccgtctctactaaaaatacaaaaattagccaggtgtggtggcgcgtgcctgtaatcccagctagtcaggaggctgaggcaggagaattgcttgaacctgggaggcagaggttgcagtaagctgagatcgcgccactgcactccagcctgggtgacagaggaagactcaaaaaaaaaaaaaaaaaaaaaaaaagtcctacagctggccgggcacagtggctcccgcccgtaatcccagcactttgggaggccgaggcaggcagatcatatggtcaggagttcaagaccagcctggccaacatagtgaaaccccatctctacaaaaattagccaggcatagtggcgggtgcctgtagtctcagctacctgggaggctgaggcagaggaatcacttgaacctgggaggtggaggttgcagtgagccaagatcgagccactgcactccagcatgggcgacagactgagactccgtctcaaaaaaaaaaaaaaaaagtcctacaattatactttatttttgtcgttgttgttgttgacacagagtctcgccctgtcacccaggctggagtgcagtgcagtggtgcgatctccacttactgtaacctttgcctcccaggttcaagtgattctcctacctcagcctcctgagtagttgggattacaggcgtgcgccaccacgcctggctaatttttgtatttttagtaaagacggggtttcaccatgtttgctggtctcaaactcctgacctacaatgatccgctcacctcggcctccaaagtgctgggattataggcctgagccaccgtgctcggccttacagttacacttttatgttgactttatgtttcaaagtcaataaaggaataaaacgccctctagtactgatgtctgtatctcaactttacattccattccaagtcattaacagtgtggagtcagagacatactgatatactagttttatctggattacaaaatcaggcacaaaatatatccccttattggctgccttttccaggatttaccaggtatttgtctatattaacacctgactttaggccaggcacggtgtctcatgcctgtaatcccagcactttgggaagccgaggtgggtggatcacctgaggtctggagttcgagaccagcctgaccaacatagagaaaccccgtctctattaaaaatacaaaattagctggttgtggtggtgcatgcctgtaatcccagctactcgggacgctgaggcaggagaatcacttgaacccgggaggcagaggattcagtgagccgagattgcgccattgcactccagcctgggcaacaagaatgaaactccatctcaaaaacaaacaaacaaacaaaaaacaaaaacaacaaaaaacatgacttccatgggcagcttctctattcctgggctacggagagccgacagtgcatccaaatgtggcccctgaacaatccctgctgcccaacagcactgacaccacgggaccctcaccccgtctccatccatgtctgggtgtgagcccttcccaggaccatgcccagtggactcttcagaagttcatgtcacagggtcagggtgagacggaatctcagtagagatgagaaggactgagggaaggcacgggtcaatgtgagcaaacgcgtcaggcaggatgcttcagactcagagaagatttgcagctccaaggcattgtctcccacctttctgaaaagagggagacagaatgatccacacagaatctttctttacctgagtaaaagccattcctgactcctttgctctcctcttctgggtttcttcctcatgtgccaggagtctttggaagtcaatgctgaataacaacaacaagtgctgtttattgcttagaaacaacacaccccctcttgtgtgacaagcacacacatacacagggaggagctcgccctgtgcaaagacggtcctctgccgcccactacaccagggtggccccagggacaagaaactcctacaggaaaaccaatacatgagtcttctgacccctttcttcagaactccctcccctcctggagaagctcacacacatgctgcagcagtggggaggagacccagccctgattaaaccccatgcagagcacagccccctttccctctctggatcccaggctgggctcagccctcagaaatagaggacacagagccttggtgttcagggctggatatagattagaatcatgttgggcactgtattatcgagggtgggtcccaacctgtgtgaatgggaatctctgggacagggatgggggcacaagaggtatatctgcaaagtaccccagcactttcatatgaagccagggggtagctctactcacatgtggtcagcccagcatagcccccaccttctgactctattctccccttgagaccttggtgtcatcaggatccagacagtggaagcagaaagaatcaagagaagcatgcagaggaggtaatatggaccagaggtgggggtgagggtgtagctggagtgtgaaatgggaagtgggtcacagaagtccccgctgagaaggtgatattggaaccgagacctggggaaggaggggtgtttgcacctgcagctgaggggccagcgagttccagcagaggcacagcccacgtgaaggccttgaggcaggagcaagctcggcccaggaacaggaaggacgcatgcttggctggagcagagggagcgaggaggacacaggcaggagatgaggtcagagaggtcctgggagggcagatcaggcagggcagatgctgtcaaacatttttctcccacacctcaaaagaattttggaaatgatgtatttcctcacccattttaattaaatatataatattttctttataaattaacccacttacaatgtaaaatcttatatatttgaaagtcccacgaaatacatggtcccgctcatctgagatgtgcaggactgcaggggaatgcatctagggagtcaggaagtcacttttggacacctgaaagtggagatacctgttacatgtcctagcagaaagttgaggagaaggctaggcgcagtggctcacacctgtaatcccaccactttgggaggccgaggcaggtggatcacctgaggtcaggagttcgagacccacctgaccaatgtggtgaaaccccatctctactaaaaatacaaaaaaattagccgggcatggtggtaggcactggtaatcccagccacttggtaggctgaggcaggagaatcgcttgaacccagagggcagaggttgcggtgagccgagatcgcgccactgctacagcctgggcaacaagagaaaaactccgtctcaaaaaaaaaaaagaggtttatttggctcatggttctgcaggctgtacaaaacacagtgccagcatctgcctctgatgagggcctcaggaagcttccgtttagggtggagggtgaaggggcgccagcagggcagacaaaatggtgagagaggagacgagagagagagagagagagaggtcaggctttttgacaaccagctctcaggggaactaagagtcagaactcactccctagagaatgacatcaagccattcccaagagatctgctcccatgacactcaccaggccctacctccaactttggaaatcacatttcaacatgagagttggtggggcaaaacaaatcatatcctaacaattgcacattctgaggctatgagtggggctggcgtgtggtacacaattggagggttagtagcagccaggagcaggaacagaccattcccagtcactactgagtagggatcccaagccctgagacaggtgggtgggtaagttggaaaagatctcttccttgcttccagggactcaacggtgaaaaaaaccaaggcctttaaatgagcaaaaagaagaaagaaaatctccagagacaaggtgcagaatagaaaaataggagaatggaagaggtgcggggcaggaattaaatgacaccaggaattctggctgtatgttttctccaggctgtggtcagctacacagggacagaagcagagtaacggagctggatgtggggatgtctgggagaaacaaatgatttagtgcacttgacttgcaaatcatctagtaactgaaagggtctgtttatgtccaatttttttttttttgagacggagtctcactctgtcaccaggttggagtgcagtggcgtgatctcggctcactgcaacctccgcctcccgggttcaagtgattctcctccctcagcctcccgagtagctgggattacaggcacatgccaccatgcccggctaatttctgtatttttagtagagacggggtttcaccatgttggccaggatggtctcgatctcctgacctcatgatctgcccgcctcagcctcccaaagtgataggattacaggtgtgagccaccgcgcctggccttttttttttttttaaacaggatcttgctgttggccaggctagagtgcagtgatgtgatgctggctcagtgcagcctcggcttcctgtgctgaagcaatcctcccacctcagcctctcgagtagctaggactacaagaggcacgagccaccacatctggctgatttttaaattttttatagagacaaggtgtcactatgttacctaggctcgtctcaaactgggctcaagtgagcgtcctgtctcagcctctgaaagtgctgggattacaggcgtgagcaaccatgcctgccatatcactatcattttaaaaataaactggagccaggcgcggtggctcacgcctgtaatcccagcactttgggagcccaagcagatcacgaggtcgggagtttgaggccagcctgattaacatggtgaaaccccatctctactaaaaatacaaaaattagccggacatggtggcacgcgcctgtagtcccagctacttgggaggctggggcaggagaattgcttgaacctgggaggcagaggttgcagtgagctaagatcacgccactgcactacagcctgggcaagagtgagactccatctcaaaaaataaaataaaataaaataaactggatatggtagaggcacatattcttttgttttaccattattattcctggtgtagacaaaaaaaaaaaaaaagagcctggcacatgacggagtatttgttgaataaatgagcagaatgatacagggtgacactagtgcaccctctggtacggtgttcactttgagggactgatgtgtgcaggggtcctgtttcacctgaggattgtcttcaccgagagtgagaagggacctgagcaggaccagctgaggggcagagccaagggcccttcatggagaccactctgcttaccaacctgtggaagggcaagcgcaagtccacccagaaacacatctggctgactatgggatccctgtctgaggctcagcagacccacgtggccaataaaagaccctaaattctgcaaaaagaagagtttgtctctgtgcccaggcccctccatggaaaaaaggtcctggggtctaagatttctcacttggcaatgatgttggcttgaatattattcacagacccagatccttgggtcttgcgtggggcaaactgactgcagaactgcaggaagtgagagtctgaacagagcagcagaaaggcaggcaggagacttgagggaggggagaaaggagagacacaagcagaccaacccctcctctccctcaatcacccgcctagggaagcattagtttcccatcatagagaggacaatggggaaagggagaagcgtgtgcataggatgagatgtgtgttgggtggacagaaagactcctttccctaaatgtgaccccattagctcaccccattctattgcacaaattcctgagcggaggggcaccctgtggggatgaacacagctcttcctgcctccagttcctgcgtctccctgccatgaccagggctgtaaccctccaactcccttcccagggccccgtggcccctctgcactggagaaaggtccatgttccacagcgggtttcaaggaccttgcccctcagctccccagctgccttgtgactctgtgactctgttatcttggaataaacagggagaggccaccggcctggctgcaagaatgtggcagctttatcttcccaaggacagtcccagtggaagcctttgggccgcaggtcagtgtgctgtgtttcactctgattcttggagaaatctttcccttactctgggaccctgataatcactccctcttgagttgcacccacagacgcccccacaacaaaccctccctaatgaaagccatctgcgcctgattcttaggatccccgttgccctctggactcagacacgcttacaaactcccatggggtcttgcactccccagatagtccataaaggtcaggcactgcctgaggacacagggtttatagaagcccggctacgaaatttcgcaagtcccagtaacaatgaaataatacacataaatatcttagggtctcactgacccacgacaatgtatttatttccactcatagtgactccaccccacacaaaagtaccaccaaagcctaccaataaaacagagatgtctctaatgatgcacgtgccccaatgagatcctaatatcttccaagaaaacactccaaactgttatttctatctttcaaaatgcatctgaaagcttcctgatcggccgggcgtggtggctcccacctgtaatcccagcactttaggaggctgaggcaggcagatcacgaagtcaggagatcgagaccatcctggccaacatggtgaaaccccgtctttactaaaaatacaaaaattagctgggtgtggtggcgcgtgcctgtagccccagctactcgggaggctgaggcacgcgaatcgcttgaacctaggaggtggaggttgcagtgggccaggatcgcaccactgcactccagcctgccaacagagcgagacaccgtctcaaaaaaaaaaaaaagaaaaagaaaaagaaaaagatactagggctttccaaactaatccatgcagtcccataaccacccataaacccacgtccatgtgctacagccagacctgagacattcctttacaattctactcactccttgatcccacaagcatgcgtgggacaggtgtacacatcattcacccggctcatctagaggcccaccttgcttccatgcccctatgtgacacctccaagaatgcttcttcactttccctcatttttctacttctcttccatgcatgaagagcacactaggctgaaaggcaaaagggcctctggacaaaagcaggaatggacacaaactgctatctgcaggacagtgggcctcaagtctagattctagaagttggccatgctggaaggaattgcccccaatttggggacaccatggaatccagtttaaaggcaggtgaagattggctggactgagctgacggaggatgtccaagaaaaagagaggccccagatctcatgagggaggctgccattgtccccttgtctctccactcacagtcccctgccaaattcccccgctgtttagggagtgcctccttcatggcccgtttagcttctgaacttctcgccacccttcctgaagggaatccaggacccctgactgtgagcgcatcacctgctggaaggcaaagcccctgcccaggatggccactgggccccgctgatgtgtagagcgtggaagacccgggagctggagtaaggcggtggggacgcctcggcactggctgaggacacagggtctgcggggcttttcaggcctcagtgaggccttctgctcttacatagactggaataaatagccacaggaagtttagaccaattacagatgaaatttccagaatatgagaccatcctcactacccgccctgtccttttggtcttccctgaggagtcttcagcccaaccccagccccagcatctgaaccacaaccccggagcaggtgctgcagtcatcccgtggcccagatggagactgtgtcctccaatggagggagacacaaaacactcaaaataatccacgcagaagagtgtccgatgtggtgatggatgcggagacagtgaaacctgaataatgtgatagagagtgacgggcagagagaatttcagatgggggtgggagggcacgggagacatctctcagtctagacccgaaggaggaaaaagggacagggtcacgatcatttagggacatagggtaaaagcagggacaacgacccgtgacaggaagggttttgacatttgggaaaagagaaaagcaaatgtgactggtgcagagggagtcatgagatgagggcaagctcccaggaggaggctggacactggcaggggccctggacacagggctgtggagccacagtgaggagttgggcttttgtcctggggaacacaggaagctggtggagggttccctgccagggactgacgtgacctgctttagatttctctgtgatgtcctcatacagagaaaggccccgaagatggtctctgtgtctgagtccctgcttcacattcttgttttcatttttagaggaagaaatccaaataaaaattttaattgcaactggctagtccccccacatacaactgccaaacacaaatgcacacccaattttgccccaaatttcaggagtcagtgttgctcacattgaggttttctggtctagtcccttatctctgttacaggtgggctcactgaggctgagagagggagtcatttcaccaagttatcctgagaggtctgagttgagtgagaaggaggagatgtggctgaattatgatgtcacgacctggaagggccaatgggctgtgtttgcctttatcacatctcccttagaaaattccaggactggccaggcatgttggctcgtgcctgtaatcccagcacttcgaggctgaaggaggggagattacttgaggccaggagtttgagaccagcctggccaacatgatgaaagctcatctctatcaaaaaacacaaaagttagccgggtgtggtggcctgtgcctgtaatcccagctactcaggaggctgaggcaggagaatcgcttgaacccgggaggcggaggttgcagtgagccgagattgcaccactgtactccagcctgggtgagagagcaagactccagctcacaaaaaaaaaaaaaaagaaaagaaaaaaagaaaattcccagaccctctttcacatatctgagcaaaagaaacttcttcaaggttttatcacattggttccaaatgcagctcacagcttactattttaacaaattacacaaaagaagaaaattgaataatagactagttaaactaggtttccatgttaaggtaaaaacatcattgacatctttatcaggtacacattgaaacaatctaaaattacctactagtcaacaaataatgcttctattatataataaagagcagaaagcatgcagacctctatcaaaactggacacaattaatttcaaagggaaagattttgaaattgttaagaaatatctgatgaattttggagctaaaaaaattgaaaacacattatatttagaaaatgccatgagctgattataggatgccaccaaagttactttggaaataattatatacagaaaaatagaaactgaattaatgaagatctatctcaagttgcaaaatgaactatacatgagatgaaagggaattagtaagaaaaaaagcaaatcaattacaaaaagcaacaacactttttttgtttgttctttgtttttttttcagacgcagtcttgctctgtcaccggatctcggctcttggctcactgcaacctccgcctcccgggtttacacaatgctttgcctcagcctcctgagtagctgggattacagatgcgtgtcaccatacctggctaagttttgtatttttagtagagatggggtttcaccatctttgccaggctggtcttgaactactgaccttgtgattcacccacctcggcctcccaaagtgctgggattacaggcatgagccaccatgcccagcctcaacacttttaatgttccttttgagcaacgttgtccaatccgcagcccaggaaggctttgaatgcagcccaacacaaattcctaaacttccttaaaacattttgagattttcttgcaacttttttttttttttttttttttttttttagctcatcagctattgttagtgttagtgtactttatgtgtggcccaagacaattcttcttccaatgtggcccagggaagccaaaagattggacacccctgctttagagagacactatgtagtgacagtctttcactttctgcccagctttactctcccactcccccttcccctccccctgccccaacgccagggaaggggaagaggatgacctgtggaattaatgagtcaagtcacttccctctgccttaacagggattgcaagtggaagctaacttctgatgccataattataaaatgcaccagccttaatagacaggagctttgcaattctcatcatctgtgcattttaaacttataaagacagaaatcaacaggtcaaaaggtagtcatcacatccagtcagttcacaactcacctggacctggggtccccctctttcctcattatggtgtgtttccctccctcgttccgtacatcgctctcattctcaccttctttctctagctctttccttcccctttattttctccctaggattctgctcattttgagcccctctcctctcctgctgctcctccccgtcttccctctattctttctcttccacttgctctttccattcttgcaatgtatttaattcctctttcttcctaatcttttcattgtcccagtctccacatatttctggctctttcttccccatttcagcactccctgttaaattccctcttccctgttacacaccgttgtccccactctttggcacccccagatcccaggcctccccgtgctgtggttctccctctgcttctccttgtcatcggctgccccctcttgctgtcccggtaccacactgccctgtctgccctggctccaaatcccttctgctctcccccactctctgtctgaggagcctcctcctttgctgcccctctccctacctggctgtccttcatctctctggatactgtgctttttctcgaaatgtgtctagttacttttctctccctgctactttctcggcttcttcttccactcttactgtctctgaaaatctctaaccatcctctactttgccatctgtttattggtttgcctcattccttcctgtctcaggttttctactgctctctctgtccctcgatccctttggcccacacattcacaggacggtttggggtaagacgcctgcatcctggaggagcgcattttccacggggtggaggagggcaggcaagaacatcgggtgtcacaggacaggccctgagcacctccccagcgcgggctcaggggaggcctggggagcagcggggcccggcacgaggaggagggaggtggggcgcgacagcgccttcagacaggggtggggtctgcaggatcccaggaccaggcagaggacgcaaggctccccgggactgcggctgcagctgcggcgctgcgctccaggggccgacgagggcaaggctgggaggcacccaggacgggaatacacctcttgggtgaagactttaaaaagcccggggatgggggagggggtcaggaaaaggttttaagcgggaggaagaagcaaaaggccggggacggggagcagcctcaaagcgacttcaacccaaagggaagcgactccggacccacactgcgaggcctgtattcacctggggtggagtgtacggggattttaagggccgtatcgaccctggacatcggctgtggaaatgggaaacagggagcgcaggtttaatctacacagagggtcactcacgctcgacgccgtcaccttcacccaacgcgatccgtttccgggcctgtaggaaactgcgcatgcgcggagagaagagcccgggcagcctgaaggaatggctggagtgggcggggtctgcgccgctttaaggtaaaaaaatcagagttgtgtgggccacttatggtggaaaccaaaatgttttccacttaccaagttgaaaacggtttatgttaaaactattttgcctgcaggttggacccgatcctgctagggagtctcctgcagcttagcagtccgggaactgggatttcggtggggaatccaaaactagcagtgattggatccataaaagttaccaaaaaacaaaaatgaagtgtctggaatcactccactggatttcaagactaccaatataggaaaggtaataaaaactgtgtggttttggggcaataaaagacatatggattgatgcaatacagtaagagagtacaaaaatagcctctacaggtacttccaactgatttttgacaaagttaccaagggaattgaatgaagaatttttaaaaactggtgaggggctaacttaatatccacagcaggaaagaagtcatctctactcaaacttcacaaccgtacagacattagttcaacattgaccatagcctaaatgtaaaatatcaaaccataaaatggtatcctgtaggagactgaaagaaaaaattactcacaataaaatcgtaagaatcaagagcttgttcaaaaattcttagccatagcagcaaaagcatgattcattaaagaaaaaaaaaatcaactggtatttaccaaattaaaaacttttggtctgtgaaagaccttcagacgatgaaagaaaaggtatttgatatggtttggctcagtgtccccatcaaatctcattttcaagtataaacctcaggtgttgagggagggacctggtgggaggtgactggatcatgggggtggttttccccaagccgttctcatgatagtgagctctcaggagatctcatggtttaaaaatctgtgatagttcctcctttgatcgctctctctcctgctgcaagcaagacgtgccttgcttcgcctttgccttcctctatgattgtaagtttcctgagggctccctagccatgcggaactgtgagtcaattaaacctcttttgtttataaattacccagtctcaggttgtcacaggagggtttaggcagtgtgaaaatggactaatacagtactgaataatagaaaatatttgcctaccatatatctgacataaaactggtatgtggaatgtataaagaatcctagaacgacttaaaaaaaaagcaaaataatcaaattagaaaatggatagaactatgaagagacatttcactgaagcagatatactgagataaatgggcacataaaaagatttccaacatcaccatccatcaaatctcagacctcagcatattctgctttctccatgtgaacccctggatgctgtcagagatcatgagaaacacaggagcttctactgaacagtccagttgatgtgtattagcaacctgtaattgtttttggaaacgaacaatggaaacacagatacaaaaatattctcagctcaagaaatatgcactttgtcattattagtgatttttttttttttttgagacagagtcttgttctgtcacccaggctggagtgcggtggtgtgatctcagcttactgtaacctctacctcccaggctcaagcgattctcctgcctcagcctcttgagtagcttcaaccacacgcacgcgccaccacacccagctattttttgtatttttagtagagatgggttttcaccatgttggccaggctggtctccaattcctgacctcaggagatccaccccccttggcctcccaaagtgctgggattacaggggtgagctacagcgcctggccaccactagaactaacacctcaggtactggatgcctccttcgaaagattggataatcgttcttacaggattatgtggtaatgagtgtctctgtcattcatttaggtaagatgcatacgcaatagtgatctataaaatatagacttaattgatctataaaaatatagatttaatacaaagttaccacaatcacaatgatatatgaagataaaccatttaaaaattacaagagatactaacaaaataggtatagatggtgagtaaaggacaaaaataactagcattgttactgtagcatcatcattaaaagctttgtctttgcaaccagacaacatggattcaaatctcgattctgcctcttactgaaatgtgacaagatgagtcttttaaagcagaatatgctgagatctgagatttgatggatggtgatgttggaaatctttttatgtgcctatttatctcagtataactgcttcagtgaaatgtctcttcatagttctacccattttctaaatatatatatatatatatatatatatatatatatatatatagagagagagagagagagagagagagagaaagagagagagagagagagagagagatggagtcccgctctgtcactgagactggagtgcaatggtgggaactcggctaactgcaacatccgcctcccaggctcaagcaattctcctgcctcagcctcccgaatagctgggattacaggcgcccgccatcacacccagctaatttttgtatttttagtagagacggggtttcaccatgttgatcaggctggtctcgaattcctgacctcaggtgatccccccgcctcggcctcccaaagtgctgggattacaggcatgagccactgtgcccagcctaatttgattattttgcttatctgtcctaagtttcctcacctctgaaatgagaatatcattaatacttatttcaggagctgatgattcagttgttacacataaagcattaataactgtgattcttactctaaatgtgattgatataaaatatatatgcaaagataaatcacttattaaagaatatatatcagttttttaaaatggaaacaaatctaaggggagtatattaaatggcagctgtcattgcaaaagttgcacaaatatcatgttttgctgtaagatcctctggctcagaaaagaaataccagccacagtaggaagttgaattgcctccagggattcaatgagagaaattatctcctttgcataaatgataattaatatcttggggactctcttattaactgtattttcatttacttctccagatgctggttaacctccacacgcttgattttcaagcatctgatctttgataacttccatattaagagacttcatttcaccatctagtatccctgtactttaattgaactaaagatttacaaggacactccattttcctatttacagagaacctagtctgtacctgccattgttttacatacattttcatgtcacaaaattttatttctaaacaacaccctcatttatgtattttctaagtgttcactggagtaacacagagaagaaatgcagtaaacatataatttggattaaaatgtatggaaggaaaaaatccttaaagtaaaaatcatatacaaaaacaaaaagtcattttactactattggctcatggctgtaatcctagcactttgggaagctgaggcaggaggaatgcttgaggccaagagttcaagaccaacctggccaacatagcgagaccccacgtctaaaaagaaaaagaaaaaaaaaaagaaaagaagctatggagaatatgttacacaataccataaactgaacaagacatgaatataacacagcctttggaaaaatgccctttggctaaaattgcttgatcatattatgtaataaacttttccacaaattcatttgcattgaactactgtaaaaatattttaggcaatttaaacagcatttcacaaatattttcaagaatgacgttgtgtaatgggccctatgggttcagcagaaaggaagagtattatctactattatgaagaaagcggaggtcttccctaacaaagaagttagaaatttcttttgtttttttgagagtctcactctattgcccaggctggagtgcagtggtgagatctcagctcactgcaacctccgtctcccgggttcaagtgattctcctgcctcagcctccctggtagctaggactacaggagtgcgccaccacacctggctaatttttgtatttttagtagagatggggtttcaccatgttggccaggctcgtcttgagctcctgacctaaggtgatccacctgcctcgggctcccaaagtgctgggattacaggcatgagcctgtaatttctggccatgcctggccagaaatcagaagttgcaagagtaaatattcagtgttgtactacagtcagtttccattttgtgatttttgtcttataccaccatttatacctctgcactccctcttcttattctgcccatctggccaagctgataatgtccgtgttccctcctttggcactagatggaagttcaaatcacgtgtgggatcctcaccccaacccacccttttattaaaggttattaccataacaccccaagcaagttatttatccctgctctctcaagccattttggaccagtttgggaagtcaatcctgcttctcacagaaagcctcattatgcaatacacatttccctaaaacttcattgttcagcatcctcattttccatatctaaaccaaactgtaaatggagttcaatacacttcctgtggagaggtgacaaattaacattaccaaaaacatgataaggctaaatttatgaaacttctagtttacctacaaaaacaaaatttccattatatatgttcatttttaagaggaaactcatgaatattagtcttgtcaaattatgtgagcatagcattcttagtgttatttttgttattctgcactatttataatttcataatttttttttttgagacggagtctcactttctcgcccaggctggagtgcagtggcaatctcggctcactgcaacctccacctcctgggttcaagtgattctcctgcctcagcctcccgagtagctgggattacaggcgcatgccaccacatccaaccaatatatatatatttggtattttttagtagagatggggtttcactgtgttggccagggtggtctcgattttctgaccccatgatccacccgccttggcctccctaagtgctgggattacaggtgtgagccaccacacccagccaatatttttcatacaattgttttttttgagacagggtctcgctctgtcacccaggctggagtgcaatggcgcgatcttggctcactgcaacctctgcctccaggctcaagtgatccacctgcctcagtctccctgaggagctgggactacaggcatgagccaccctgcctgggtaatatttctattttttttgtagagacagggttttgccatgttgtcctggctggttcaaactcctggactcaagtgacccccctgccttgggctctcaaagtgctaggattacaggcatgaaccaccacacccagcccatacactttctatatttgtattttcacttcatgtaaataaagatgcatgccatagttatttagcacacaagcatgtaaaaatataatatggtatatattcaccaacactgtggcagctttcagagtgtaagagtatgaaaactgcactttctatgggattttcattatatccatataaatattctaaggcagagtgtagagagaataattcaagtgcagagtatgattacattttcccaaaattgtatgttgattccacaaagaaaaaaaaaattgttctacatcctccaacctaaaagactgagtgtattgttattatctgctatgaagtatcctactgaggtaggataaaatgatgttggtacaaagaatgtgatttgtttatagttataagaaaacgttgaattttttttagcaaaacattatgtctgtgacacattcttaataaaactgtagcaaaatgtaattccagcaattagtgtgaattctactaaaaacaaaacaaaacaaaaaaaaccatggtattctggtttttctgaccaagctctccactctaataactgttacctcttcaatttcaaaaataagcctatttttcatcaatctctgctataaaacagctattgccattcagtagagaaagtggcaaccatttcccctgcactattcccatcacataatcagtcactaataacttattactctcctctcataaaaattccagtgtcctgaggtcttggcctgctcaatgcaggtagagccttacttccctaaaacccatggtgtctttctctcagaaaagcaccctgaacacaatcagtatgatgattgatatcatagttttacattattttctgccccaaaaccatggtctctcaattgagagaatatttaattttacaaggcagagtcctccttcttcaataaacatggataaaaatgatcctcatgtaatgaagtaagcctttccatactgtggttctttcccagataggcaccacgaaaggtgcttaaggatgcaaaatagccacagatccatagttcaggttgaaagtcacaaacagtagcctttttgagaaacctcaaacaatggaataaaagattttataacctgaaggtaagtagccatttccaaatgtcctttgacctttgaaatatataatgtcttaagttttaccatattggaacgtgtaattattgtgcagtttatcattttaaaagtgaatcaaagaactagagactgagtcactctttgtatgaatcctcacctacagttacagtcttagagtaagagcttcaggatgctcttacacattacatttgtgtggttccatcaaatacgtagattttaatgcctgcaaagctgtgaggcctgaataaagcctctgtcacacacagtacatttatgtgatttctcattattatggactcttggatgtctattaatacttgaactcatgaggagtttgccacagtcattgcattttttttttttcctttaagatggagttttgctctttttgcccaggatggagtgcattggcacgatcttggctcactgcaacctccgcctcctgggttcaagtgattctcctgcctcagcctcctatatagctgggattacaggcgcacgccaccaggcctagctaattgtgtacttttagtagaaatggggtttcgccatgttggtcaggctggtcttgaactcctgacctcaggtgatccacctgcctcggactcccaaagtgttgggattacaggcatgagccactgcacccagccagtcattgcattttcaaggaatctctcaggcataaattctctgacgttgtcaaaggaatgaattctaactgcaaaagttaccaccttcatttgtaaggtttctctccactatgaattctgtgatggcttgcaaggtttgaactctgactttagaactttccacacgttacatttgtaaggtttcccaccagtatggattgtctgatgggtagttaggcttgaacagatactaaagggtttcccacactcatatggtttctctccggtatgaattctctgatgccttgcaagttttgaagtttgactaaaggctttgccacactcattacacttgtaaggtttctctccagtatgaattccccgatgtcttgcaaggtgtgaattctgagtgaagaccttcccacactcattgcatttgtaaggtttttttccagtatggattgcctgatgggtagttaggcttgaacggacactaaaggctttcccacactgattacactcatatggtttctctccagtatgaactctctgatgccttgcaagctttgatgtttgactaaaggctttgccacattcattacactggtaaggtttacctccagtatgaactctccgatgtcttgcaaggtgtgaattctgagtgaagaccttgccacactcattacatttgtaaggtttttcaccagtatggatgacctgatgggtagttaggtttgaatgttcactaaaggctttgccatactcattatacttgtaaggtttctctccagtatgaattcgctgatgccttgaaaggtatgaattatgcctaaagaccttgccacattcattacatttataaggtttctctccagtatgaattccccgatgtcttgcaaggtgtgaattctgagtgaagaccttgccacactcattacatttgtaaggtttttctccagtatggatgacctgatgggtagttaggcttgaatacacactgaaggctttgccgcactcattacacatataaggcttcactccagtatgaattctttgatgatttgcaaggtgtgaattttgagtgaagaccttgccacattcattacatttgtaaggcttttctccagtatggatgacctgatgggtagttaggtttgaatgtgctctaaaggctttgccacactcattacacttataaggtttctctccagtatgaattagctgatgccttgcaaggtgtgaattacgcctaaagaccttgccgcattcatgacatttgtaaggcttttctccggtgtgaattaccagatgaatagctaggcttgaacgaacaccaaaggctttgccgcactcattacacttgtaaggtttctctccagtgtgaattctccagtgatttgtaaggtgtgaattttgagtgaagaccttgccacattcattacatttgtaaggtttttctccactgtgggttgcctgatggatagctaagcttgaacgagctctaaaggctttcccacactcattacacttgtaaggtttctctccagtatgaattcctcgatgtcttacaaggtgtgaattctgagtgaagaccttgccacattcgttacatttataaggtttctctccagtgtgaattttctgatgttgtgagagttgtgaatttcgactaaagaccttaccacactcattacatttgtaacgtttttcgccagtatggatcacctgatgggtagttaggtttgaacgtgttctaaaggctttgccacactcataacatttgtaaggtttctctttagtatgacttctctgatgacttgcaaggtgtgaattttgaggaaagaccatgccacatccattagatttgtaagggcttccccaattatttgctttttgcccctgtgtgagtaataaagaagagataaaatctttgagatatttcttagaaatgtgggttttgacattataaggcatttgttgaggtggtgaaactgaggaattattgttgaaagacttctcaacctgattacattcataaattttcccttcatattgaaaaagctgcagttcaggcagatgtgactgaaggcttaatccaagctgatttttaataagcttgtttcttgcatctcttttatcatgttcatctcttccatgagtgagattgccttcttgggtcaaaagcactcctttgtaatttccttcagcatctctgcattgatactcaaggccatgtgtatttttctggacttccctgaaggaacatccttcaatgtcttggctttcctgtctttccaacatcactgtttggaatacttctcctgtattactcttccctttgtgtagtaaatctttcattacaaattcggaagagagagctacaagatataaagatccataggtttccaattaattgtagtacgtaaacaagtattttacaccgaaaaacaatattacaccgaaaaacaatattaaaccaaaagcaattcttatattaaacagatttatgaaacttcagaacaataatattcaatttttaggaacacaaaggaaagaggattgtttaataaagttgattccatgtaattcaaattaatagtatggaagcctagttcccaacctacaatactgtagccagcaaagcaatcgttcagtcataaaggagagaaagtcttccccagacaaacaaagctaagggaatttaccatgatcagacctgttttacaagaaatgataaagggagttcttcaaatccaaagaaaatgacacgatgtaactgttacactaatattaatatcataatcatggtgtgcaaaccatttgtatatttactaagagggctaaaagataaaactattaaaaataagcacaacagtttgttaagtgataggcagtacacaacataaattgcgacataaaaaattcaaaatgcagggtgagaagggaacgaacatgcacagaggttttagtttctttttttgcaatcaaagttagttgatattgatttgagataaattgttaaaagctataggatgtttttatatttatttatttattttttattatactttaagttttagggtacatgtgcacaatgtgcaggttagttacatatgtatatatgtgccatgttggtgtgctgcacccattaactcgtcatttaacattaggtatatctcctaatgctatccctcccccctccccccaccccacaacagtccccagagtgtgatgttccccttcctgtgtccatgtgttctcattgttcaattcccacctgtgagtgagaacatgcggtgtttggttttttgtccttgcgatagtttgctgagaatgatggtttccagcttcatccatgtccctaaaaaggacatgaactcatcattttttatggctgcatagtattccatggtgtatatgtgccacgttttcttaatccagtctatcattgttggacatttgggttggttccaagtctttgccattgtgaatagtgccacaataaacatacgtgtgcatgtgtctttatagcagcatgatttataatcctttgggtatatacccagtaatgggattgctgggtcaagtggtatttctagttctagatccctgaggaatcgccacactgacttccacaatggttgaactagtttacagtcccaccaacagtgtaaaagtgttcctatttctccacatcctctccagcacctgttgtttcctgactttttaatgatcgccattctaactggtgtgagacgtaagccttattttatggtcaccacaaagtaaaagcctgtaatagacatattaataataaaaagcaatgaattaaaacatactgccgttttgttacttcttttctaattgttttctaacttctctcttgctttctttcttactgtcttcctttgtgtttaagtgatttctctggtagtataagtccttacctatcaataataacattaaatagaaatggactaaattttccaattacaagagagaggcctgctgaatggattataaaacatacagctaactatatgttgcctacaacaaactcacttcacctataaggatacatgtagacaaaaagtgaggggatggaaaaagatatttcatggaactagaaatcaaaaaagagcagtagtaggtatacttagataaaatagactttaagtcaataagtgtaaaaagagacaaagtcagtatataatgagaaaaggatcaacttagcaaaaggacataataaataagtacacacccaaatatgtaaagctaatgttaataaatctaaagggagagacaggtagcaatacaataatattaggggacttcaaaacacaatttttggtaatgaataggtcatccaggcagaaaaccaataaaaaaaaaattagagttaaaatatactgcagactaaatggacctaaaaaaagactttttaaattttttttctattttaaacagatgggatctccctatgttgcccaggctgtggtccattgcctagtcacaggtgagttcacagtgcactgcagccttgaacttctggccttaagcattcctctctcctcagcctcccaagtagctaaaattacaggtatgttccatgccctaacagacgtttacagaccattttatccagctgttgcaaaatacatattcttctcatcagcacatggattatgcttcaggatagattatatgttaagacaccaaacaagtctcaataaattcaaaaaagtcaaaattgtatctagtatcttttctgaccacaataaaataacactagaaaccaacaagaagagcctcagaagatacacaaacatggctgggcgtgatggctcacacctgtaatcccagcacttagggaggccaaagttgggcagatcacctggcgtcaggagttcaagaccagcctggccaacatggtgaaaccctgtttctactaaaaacacaaaaattagccaggcgtggtggcacacgcctataatcctagctactcgggaggctgaggcaggagaattgcttgatcccaggaggtggaggatgcagtgagccaagattgtgccatgcactccagcctgggtgacagagcaagagtctgtctagaaaaaaaaaaaaaaaagaagatacaaaaacacatggaaattagacaacatattcctgaacagccactgagttaatgaagaaattaagaaggaaataaaacatttctttttttttttttttgagatagggtcttgctctgtcacctacactggagtgcaatggtgtgatctcagcccactgcaacctccacttcctgggctcaagtgatccacccacctcagccccccaagtagcagagaccacaggcacacaccaccatgcccagctaatttttgtatattttaccaagacagagtttggacatgttgctcaggcaggtctcaaactcctgagctcaagcaatccgcctgcctcagcctcctaaggtgctgggattccaggcatgagccaccatgcctggctaaaaatttcctgaaacaaattaaaatgcaaaacagcacaatctataggatacagaaaaagcagcaaaaagaggaaagtttgtagcaataaacacctatatcaaaaaaacagtaagtcaacaaataaaacacctaatgatacaactcaaggaactagaaaagcaagaacaaaccaaacccaaaagtagtagagggaaaggaataataaagatcacagtagaactaaccaaaataaagactaaaaaaaaatctaagatcaataaaatgaaaagtaggattaaaaaaaaatttttttttttttgagatggagttttgctcttgttgcctgggctggaatgcagtggcatgataccagctcaccataacctctgcctcccaagttcgagagattcccctgcctcagcctcccgagtagctgggattacaggcatgtgcccccacgcccggctaattttgtatttttagtagagatggggtttctccatgttggtcaggccggtcttgaattcccaacctcaggtggtccacccaccttagtctcccaaagtgctgggattacaggtgtgagccaccgtgcccggcctaaaaaaatttttttttagagatggggtctatctctctcacacaggctggagtgcagtggcccagtcataactcactgcagccttgaactcctgggtttaactgatcctcctccctcagcctcccaagtagctgggactacagaaacgcactaccatgcttggctaattttcgttttatttttagagatggggtctctttctatgttgcccaggctggtttgaactccccgcctcaagcaattctcctttctcagtctcccaagttcctgggattacaggcatgaggcaccatgcctagcttgaaaagtaggtttttctaaaagataagcaacatcaacaaacttttagctaaactgaaataaaaggtggggggaggtacacccaaattaataaaatcagagacaaaacagaaaacattagaactgataccatagatacacaaaggaccattagggacaattatgaacaactacatacaaatttaaaaacctagaagaaagggatacatttctggacacatacaacctatcaagattgaaacatgaagaaatagaaaacctgaagacactaataacaaaattgaagctgaaaaaaaaaaaatttcatgtagaagaaaagcccaggattgaatggattcactgctgaattataccaaacacttgaagaagaactaatactggctaggcatgttagctcacgcctgtaatcccaacagtttgggaggctaagatgggaggactgcttgatgccagaagtttgagagcagcctgggaaacacagcaagacctcggctctactaaaaaataaaaaaggatttggccaggcacggtggctcacgcctgtaatcccagcactttgggtggttgaggcaggtggatcacctgaggtaaggagttcaagaccagcctggccaacatggtgaaaccccaactctactaaaaatacaaaaatcagccaagtgtggtggcacacgcctgtaatcccagctacttgggaggcagaggcaggagaatcatttgaacctgggaggcagaggttgcagtgagccaagattacgccactgcattccagcctggacaagagaacgagactgcatctcaaaaacaaacaaacaaacaaacaaaaaaacacaattagttgggcgtggtagtgtgtgcctgtaaccccagctactggggaggatgtggagggagggtcagttgagcccaagagtctgagtttgcagtaagctatgattgtgccactgaactccagtctgggtgagatagagagagagagactatctcaaataataataataataataataaagaaagaaaagaaaaaataaagaatactaattctactcaaaccatttcaaaaattgaaggcagcacatatttccaaactcattttatcagaccagcattaccctgataccaaaaagcagacaaggacaccacaacaaaaagaaaactataggccactacccctgatgaatatacatgcaaaaatccttgacaaaatagaattcaacaacacattaaaaagacattcaccatgatcaagtgggatctattccaggaatgcaaggatagtttaatacacacaaatcaattaatgtgattcatcacatcaacagaatcaaagacaagaagcatattatcatttcaatagatgctgggaaatgactcaataaaatcattatctcttcctaataaaaagtctcaacaacttgggtacagaaaaaacatacctaagcatgataaaagccatatatgacaaatccagcaggaatgtactaaataagaaaaaactgaaagcctttctgctaagatctgaaagacaaggatgtccactttcactacttctattcaacatagcattgatgttctagccaaagcaattaggcaagagaaagaaataaaaagcatacagattgaaaaggaagaagtcaaaatatacttctttgcagatgacatgattttatatttagaaaaacctaacaactccactaaaacactcttaaaatttagctaactatatagaatttggatctgtaagactgagaactgggcatcagatagaatcaactacagaaggaaacaccaaaggagatgaaataacccttttgtaacagccctccctgtgccacacggagtcaaggaaccagagttctcagaagctagaaaacagtgttgtccatcatgataaagactttgcctttgtctgagctgcagcaccactggaaggtgaaaggataaactagtacaagtctaaaggatagacaaaagggggcaaataaagatttctgttctgaggtcacagaattcaaacttgttttcccacagaactctcagatttgcatagagtttcccaaacactatttaataaacggcattttctctacccatctgaactcttacctgtgatcacagctttgatccattcccatccatctgggtttcctgctatttgtacttggctctccaaagtgaaaggctccttcccttgctccaacatagagataatactgaggtcaaaacaagagattcctgcttatgaaaagaaaggaaaacaatgggctgtagattttccagagtcccagtcctatgtttacatgaggagggaggactttacagctgtatctaaaaaaacacttcaaaaattcatccactaaatgcttctttataaattgttaggaaacactataatatgcaaatatatagctctcatcccaaaaccactgaatcaaagcatggggatagaaaacagggaattggatattttaaaagtcctgaaaccctccagtgacatcaggaagaggaaaattaaaatccagtttccacattatggagattttcatttttcagtcaacacagcttcagtctcagccaagcaatgcatgagctcccaggagagccacatggaaaatgaaaagatacacaggggcagatcctgacttctggaagaaagtcatcctcacccagggaggccaggttcctataattctccaacatcacgtccctgtacaaagtcctctgagcggggtccaggcatgtccactcctcctgagagaattctatagccacatccctgaatgtcacctgtccctaaaatgaaaaacacatccaccagggggatataaggaaaagctccaatcttcacataaaatgagaagacagaatagattaaactggagtaagtgggccgatatccaagttgtgatataataaaatatacatatggtcttcatccccctttcctgacatacatctcacttggaatctctggagtgataagtgcctttgtaagctaatgagatgactggtggctggaggccccaagatagtttcagaatggcggggtggtcaccagaaagaccaaggctggattacagagttgggacttcgagccccatcccccaacttaccctgaggggatgggggctgaaggctcggctgatcaccagtagccaaagatgtaagcaatcgtgcccacttaatgaagcccccataataacccgaaaggacagggcctgaacaagcttcaggatagggaaacacacggaggctctgaggacgcccccaccgacccccaccaaagacagcactcagcctcccaagtagttgggattacaggcatgcaccaccacgccatgctccttctcccataccttacccaatagactgcttacatctggctgttcatctgtatactctgtaatatcctatataataaatgggtcaatataaataaagtgtttccctgatttctctgagccattctagcaaattaatcaaacctgaggagggggtcatgggaattcatgatgtataagccagtcagtgagaagcagagaccatctgtgtttgcaactggcattgaagtgggcacactcttgttggattgagccctcaacctgtgggatctgatgctatgtccaggtagacagtgtcagaattgaactgaataggaggtcactcagctggtgtccagtgcagaattgctcccttggtgtgtgtgggaaaacccaggacatctgggatcacagatgtgttttccgttgtgagagtacagtaggagaaactgggtctgttttcaccacatcctcacacacacaggtatttttgggcagaatgtttccttaattctgtcttcttatactcttctataagaggttatgatagtctttaaatcagtgttgatttctcagttttgtagacaatacaaaaaatacacaaatatacaaataaaaaaccaacaccgggttatctttattgaagtgctatatattatgtctaacacaccaagtgatattcagtatttagatgatctagagcatgagtgatgtcttacgagatgaaaatgtgtacagtgactttaaagaaaggtcagaatctaaaaactgtgatcatcgcaataacaatgacagatgtttctgagcacttcccaagtgcaaggcattattctatttatttatttacttacttacttatttttttgagacagagtcgctctatcacccaggctggagtgcagtggcatgatctcagttcactgcaacctctgcctcctgggttgaagcgattctccggcctcagcctcccaagtagctggaattacaagcacccaccaccacacccggctaatttttgtatttttagtagagatggggtttcaccatgttgaccaggctagtctcaaactcctgacctcagatgatccacccgccttggcctcctaaagtgctgggattacaggcgcaagccactgtgctcagtctggcattattctaaataaatgtcctgcatgtactaacttgtatatgaatatgatagcccatgagagaaagatctgttcccatcttactagcagataaatgtatatgacagacactctaagaaacttgcgtcaagacaaagagctaaaatgtcagagcaagcatctgaatccaggtgtctgggaataagaattaaacctaaagaatcaaatagttggccaggcgtggtggctcatgcctataatcccagcactttggaaggtcgaggcaggcagatcacgaggtcaggagatcaagaccatcctggctaacatggtgaaactccgtctctactaaaaaaatacaaaaaaattagccaggcatggtggcgggcacctgtagtctcagctactcaggaggctgaggcaggagaatggcatgaacccaggaggcggagcttgcagtgaaccgagactgtgccactgcactccagcctggatgacagagcaagactgtctaaaaaaaaaaaaaaaaaaaaaaatcaaatagttaagtaaaagaacatgaaaaggatctaaatgagcaaagttgaaacaagttcatgaataacaacatggaacttcataaaaggtaattacatatatacacacatctatttatgcccataatatgtaactattcttactattaaatcattaatgtgatagctgagaacaaatttaaggacacagaaaatatttaagatacaatttgaattgctaaaaaacacaaaacttatttaaaatcatgatgtgtgggctgggtgcagtggctcacacctgtaatcccagcacttcgggaggccgaggagggcggatcacgaggtcaggagttcgagaccagcctgaccaacatggtgaaacaccatctctactaaaaatacagaaattagccgggtgtggtggtggacatctgtaattccagctactcaggagggtgaggcaggagaatcgcttgaacccgggaggcagagattgcagtgagccgagattgcaccactgcactccagcctgggtgacagagtgagactctgtctcaaaaaaaaaaaaaaaaaaatcatgatgtgtgcttaataaaaaaacacgcactcacgtcacatatacacagtttagtaataacaacagtgaaaaggtaaaacatccactctgtcctcattcagagaaggctccaataaagatgtagaatgagctatacatctttcctaacatgaaaacatgtaaattttcaaaatttgcaggctaaaatgtcacaacaaaacattcactgaagggccgggcatggtggctcacgcctgtaatcccagcgttttgggaggccaaggtgggctgatcacttcaggtcaaaagtttgggaccagcctggccaacatggtgaaaccttgtctctactaaaaatataaaaactagctgggcatggtggcatgcaactgtagtcccagctactttggaggctaaggcgaaagaattgcttgaatccgggaggtagaggttgcagtgagccgagattgcaccactccagcctgggcaacagagtgagactctgtctcaaaataaataaatacaataaatagaatatttaataattggtaaaacaggccgggcgcagtggctcacgcctgtaatcccagcactttgggaggccgaggcaggtggatcacgaggtcaggagttcgagaccatcctggctaacacagtgaaaccccgtctctattaaaaatacaaaaaattagccgggcatggtggcgggcgcctgtagtcccagttacttgggaggctgaggcaggagaatggcgtgaaagcaggaggcggagcttgcattgggctgagatcatgccactgcactccagcctgggcgacagagcaagactccgtctcaaaaaaaataaaataaaaataataattggcaaaacaagaacgtggttctaccctctctaatgggaaagaagttctgctcctataaccgaacaaaataataaccactctcacctagcaccagttgcacaagggtccctgcagaaacaccagtctccattgtatgggttttctgaaaatagttcaatgattctcctgcattttccatttaggttgatttcatgtattaaaatagatgatgggatgaaagaaccctctgtcactgatgtctgtcagtctaaaattcccattccattcccagtcattaataagagtttggggttagaaacacagtgactcacttggtgagcttcaaatgtaatgtaaatgagccagaaaaatttccccttattagccttattttacataatttagcaagtatttgtgcacattaacacgtgacttccacgtgcagctgctctaatcctgctccacagagagctgacagtgcatccagatgtggcccctgaacaatccctgctgcccaacagcactgacaccacaggaccctcaccccgtctccatccatgtctgggtgtgagcccttcccaggaccatgcccagtgcagcctcttcccaagctcatgtcactgggtcacgagagatggaatctaagtgagatgagagggactgagggaaggcacgcgtaagtgcgagcaaacctgtcaggcaggacgcttcagactcagagaagattcccaacttcaaagaatgacatttcaagaagaaataagagacagaacaatccactgataatattaccttacctgggtgagagccatgcctgacttgtctttctttcctcttcctcttcttcaagggttcttccttaggtaacaggaaagtgcctttagaagtcaatattgaatatccaaaatgtgctgtttattgctcagaatcaacacatccccttcctatgccacaatcacacacacacacagggaagacctcaccctgtggaaagatggtctcagctgcccactgcaccagggcaatgcagggacaagaagctcctatgggaagatcaataagtgagtttctgacccctttcttcagaacccactctcctcctggagaagcccacacacacgctgcagcaattgggagctgggctggactgagctcccccattcagggcacagaccaagccctgaccaaaccccatgcagagaacagcctccctcacctctctgtggattgcaggccaatctcaggcctcagaaacaaaaggtagaggctgaacgtggtggctcacactataatcctagcactttgggaggctgaggcagaaagatcagttgaggccaggagttcaagaccagcctaaacaacatagtgagaccccatttctcttaaaaaaaaaaagtaataaatttagccaggcacggtcactcacgtcttgtaacctcagcactttgggaggcctagatgctggatctagagttcacaggagaggcctgcaggtgacatgaagctgtgcaggtggggttgaaagccatgagctgagttgataaggaaaggcaatgagtgcggacagagaaaaaagtggctggaggactaagcccacgttcagagaacagaaagttctggagacacaagaagaggaaagcataatgtgattagggaggcaacaagaaaattacaacaaatagatgtgtaaagcttaacgggatgtcctaaaagccaagaaaatagaagagaaagtgagcaactgtgccacatgctactgataggaatggaaagatgacaggaaattaaacattgaatttcaaatggatccatcactggtaaatgaaaaagaaaggatcagtggaatgttgggtatgagagcttgattcaagcaagagttcaagcaaggactgaaggcaagaattgaacataaagtaaaaaaaaaaaaaattgtagtgtattgtgctcttaaacggagcatagaagagtacttactacagactgaaaggtagtttagagttttgttttgtttttttttttgagatgaagtctcactcttgtcacccaggctggagtgcaatgttgcgatctcggctcaccgtaacctccgcctcccaggttcaagcgattctcctgcctcaacctccagagtagctgggatcacaggcgcgtgccactatgcctggctaatttttgtatttttagtagagacagtgtttcaccatgttggccaggctggtctcgaactcctgacctcaagggatccacctgccttggcctctcaaagtgctgggattacagccgtcagccaccgtgcctggccaatttagagtattttttgttttaaagatggagcgtagaagaaaaaaagactttattctgtgtgtgtgtgtgtgtgtgtgtgtgtgtgtgtgtgtgtgtttgttttttgtttttgagacagggtctcactctgttgcccaggctagagtgtgacagcatgaacatggcttactgcagcctcaagctctcgtgttcaagcgattctctcacctcagccttgcaagtagctgggagcgcaggtgcaagccaccacatccagcttatttttttctatttttcgtagagacggagtcttgctatgttgcccaggctggtctcgaactcctggactcaagcaatcctcccaccttggcctctgaaagtgttgtgattacaggtgtaagccgctgtgcccagccctgtgtacgtgtcttaatggagaacaccactccctaggtacagggatgaattcccttgaagttaaaattttgaaagctttacagattgtgaaggaaaaaaaaagttaaaattgatggcacgcatattgtcctgagactgtgagtgaggctggtacatggtacacaattgcagggccagcagcagccagaagcaggaacaggccattcccagtcactactgagtagagatcacaggtcctgacaggtgggtgggccacttggaggtcttttcctttagtctttgagataggaaaaaacccaactctacattctgctctcacactaaacacagaatacttcacctctagtcaccaaaatgtgtgtgtggcttttcccacaatgaccaggggactcccaggggactcccagctcgggggggggggggggttaggcgggggtcctacaatttcattcaactctgatattatctacaagacagcatgggccgggcacagtggctcatgcctgtagtcccagcactttgggaggccaaggcaggaggatcacttgaggccaggagttagagaccagcatggccaacatggcaaaacctcgtctctactaaaaatacaaaaattagctggatgtggtggtgcacacctgtaatcccagctacttgggaggctgaggcaggcaggagaatcgcttgaactcgggaggcagaggctgccttgagccaagattgcgccactgcactccagcctggacaacagagcgagactgtttcaaaaagaaaaaaaaaaaaagactgcatgacgaggtgctacaggttcagagctcagtctaaaactgcccctcacttcagacacagtatgccagtggtaactgtcacttatacttttgagtgacctgataaatactgtggttctcttaacccctcctcggctttgattaactttctaggacagctcttccttctgactgttcatctgtatcttctgtaatatccttcataacaaatgtgtaaactaagtgaagtgttttccctgagttctttgagccgccctcacaaattaatagaacctgaggtggtggggagggggatgtcaagggaatccccagtgtatagctggtcgctcagaagttcaggtaccaacgggagacttacaactggcacctgatgcgggggcaatttcgtggaactgagcctcaatcagtgggatctgatgctaactccaggtagagagtttcagaattgagttaaactatacgacactcagttagtgtctgatagagaacgggttgttggtgggagaaatccgcacacattttcgtgagtggaggcgagacactgtgtagaatgtgccctgttgtattgagtgtgacaggaaagaaaatcaaaggaaaaatattttttcctcttagttcatacactcgcccacaccctaccctattccaggaaaagggaagtgggtggactcaaaactaaatgagcgaagtcactgccctctggtttgaatagtgattgcaaatgaagctataccctaatactaataattgtcaaatgcacgtgttacgcattttacataaaggagtttcttccattctcatttgcaactgcataatttaagtaaacgtattttaaatgtgttgcattattttaaacccagaaaccaatgtcacaatgtcatcatcacatctaatcaacgcaccactcacctggactcagggtccctctcttgcttccatactgtgtgtttccctccctcatcctctacatagctctcattctcacattagcttattttttattttctgtgtttttcccctggttctttgcgcgtcgttctgagcccctctcatctcctgctatttctccccttcttcctccgcttgcacctgttctgtcccattctggggccttgtttcaactctgattcctctttctccccagtcttttcattgtccccagtctccatatatttctgcctctttcttctcccatctctgctccctctgttgaatctcctcttcccttctacacctcttgccccactctctggcacccccagatcccaggcctccccctgctgtggttctccttctgctctcctcgtcaccggctgtcccctcttgctgtcccagcaccacgctgcttgtctgccctggctccaaatccctcctcctctcccggactctgtctgaggagcctcccactttctggccctctccctaccttgctgtccttcatgtctctggacatcgagcttttctctacatttccccagttgcttttctccttctgccttctcagctccttctcttaccatctgcaaatccctcgcccatcctctactttgccatctggttacgggtttccctcactctttcctctcagtttttctacttctctctctgtctctgcccctttctctacctgctaatccccttggtccacacattcacaggaaggtttggactaagacgcctgcatcttggaggagcgcattttccaggggctggagctgggcaggcaagaacaccgggtgtcacaggacaggccccgggcacctccccagcgcgggctcaggagaagcggggactgcgaaggggaggcctggggagcagcagggcccggcacgaggaggagggaggtggcggggcgacggcgccttagaagaggggtggggtctgcaggatgccaggaccaggcagaggacgcggcctcgccggtaccggggctgaggagctgcgctccaggggccgacgagggcgaggctgggaggcacccagggcgggaatccacctcgcgggcgaggactttaaaaagcccggggcgggaggaggggtcaggaaagggttttaagcgggaggaagacgcgaaaggccggggacagggagaagcctcagagctacttcaacccaaagagaagcgactccgaacccacaccgcgagtcagctggggtggagggcgcggtgcggggatcttaaggtctgtagctgccgggcgcagtggctcacgcttgtaaccccagcactttgggaggccgaggcgggcggattacctgaggtcaggagttcgagatcagcctgggcaacacggtgaaaccccgtctctactaaaaatacaaaattagccgggcgtggtggcacatgcctgtaatcccagctactcgggaggctgaggcaggagaatcgcttgaacctgggaggcggaggatgcggtgagccgaaatcgcgccattgcactccagcctggacaacaagagtaaatctccgtctcaccaaaaaaaaaaaaaaagaaaaaaaaaaaggtctgtagcgagcccgggaactggctgcggaaacggggcacggcggttcgcaagtttaatccatactgagggacactcacgctcggcggcgtcacccgcacccaacacgatccgcttccggaactgcagaaaactgcgcgtgcgcggaaaagagcccgggcactctgggggcggggcctggggagaggcggggtctgcggacgaaacgctggggcggagctggggcggggtctgcgcttccctcagcctgcctagcccgcagtctcatttttcccggtttagaaacgctggagtgttcactatgtccccgggagcaccgttccaatttgaagcagttttaaggtgaaagaatagacttacgtggaccacttatgatagaaaccaaaatgatttcctcttaccaagttgaaaacggtttatgttaaaattgtttgccggcgggttggacccagtcctgctagggagtctgctgcagctcaggaacggggatctgggaatcggggatctcggtctgggaactgggatcttagtggaggatccacgaggcacggcgattggatccagcaattcctgcaattaaaatgtatttaatttaactaaaatgtctggaaattatctctgaggatgattcaaagtagaatgggaaatgcagcatcctacctggacggatatgcaatttaatgcagtagcccaacagaacctcctttacatttcaaatccccattctccccagtggaagagtcaagcctgtgctcaattcatgggaaggttaaggccgataagttagatcaccaagggctgctttattgttctttaaaacatatatttttgtaaagatgggagtctcggcccaggctggtctccaactcttgacctcaagcaatcctcctgcctgggcctccaaaattgctgggattacaggagtgaactactgtgcccagtcaactactgatttaaaccatgtgaatttttaaaaaatagagataaactgcattatttttgcttatattcgttattccgttccacacttgaaatgacttaaccacaaacaactttgacataatctttctttgcatcaaaatatgcttaaatcaataatttctaaatatcatgtaatttcaaattcactttatgggcattctgaagggaacttgacacagtactttttattttaaaattgtaatctatattgggtctatttttttgttttctgtttcttaatgttctatcagatgtggataacagagtgtggaaaatagtcaccacatgacaattggatttattttcgcctaaagaatagttttccagtatttctaacgtaccatcccagtacattgactgaactaaagactcacagggatacccttttttcatgtttatagagaacctagtttatacctgctattgtcttatgtacattttcatgtcacacaattttatctccaaacaacacccttatttatatacaccgtatagttttcactttaacaaaatattaaacgtttcatctgggttacaatatatgaaagaaaaaaataaaagggaaaatcatattaaaaaataaaaagtaattttactacaattgaacataaaccatgaaatatattgctcaataccataaactgaaaataacatttccatagcctttggagaaatgcccttccagtaaaactgcttaatcatatttattatgtaagaaacttttccacagattttcactgagttagtataaaaacatcttaggcattataactaaacaggatttcaaaaacattttcaacagttgtgttatttttaatgagtcctatgggtacagcggaagaataaatgtagaatattactatcaagaaaactagggcagggcgtggtggctcacacctgtaatcccagcactttgggaggcagaggcgggtggatcacttgaggtcaggagttcgagaccagcctggccaacatggtgaaactgtctctactaaaaatacaaaaattagccaggcgtggtggcacatgcctgtagtcccagctacttgggaggctgaggcaggagaatcacttgaacctgggaggtggaggttgcagtgagccgagatcacgccactgcattccagccccggtgacagagcaagcctccgtctcaaaaaacaaaacaaaacaaacaaacaaaaaagaaaactggggtcttcccaaaccaagaattcagaactttccagagtaaataattcagtgtactagcgtcagtctccattttgtgatgttgtactactaacgcttttacagctctgcacttctgttctgcccatttggtcaaactggtcatgcttgagtgcttcctcctttgtcactagatggacgttcaaaccacacaaagcttcctctaacccatccccacaccttatcaaccataacacaccaagcaagttgcttatctgggctctcaagccatttttagaccagctttggaagtctacccagctttccccagaaacccacattatgtaataaacagtctcataacacttctcaaccaacctttaggtgaagttcaatacagttccagtagagaggtcacaagttcaaatgatcaaaatgttatgagggtgaacatacaaactttgtcgtttatctgccaggaaaaaaaaaaatctgaatgtgttatgttctttcttaaaagaaaatttatatatattaatttttccaattgccactgagcattccaaaggtaaaaaagagatgttgttgtttttatccatattccccacagtttttttgtttcctaatatgtcatatttttactatacttgtattttcacttcaggtacatcaagataaatgccataggtgttatttggcatgcaagaaagagacatgcaaaaatataataatactgtgcatatgcatgaagagcaatgcagacttcagggtgtgagagtctgaaatatcctttctgtgggattttcattataccacataagtatcccaaggcagagtgtggagagaataattcaagtacaaaatacaattagtttctgggctgggcatggtggctcacacctgtaatcccagagctttgggggggccaaggcaggtggatcacttgaggtcaggagttcgagaccagcctggccaacatagtgaaaccctgtctctactaaaaatacaaaaactagccgggtgtggtaacgggcacctataatcccagctacttgggaggctgaggcaggagaattgcttgaacccgggagacagaggttgcagtgagccgagatcacgccactgcactccagcctgggtgacagaatgaaactccatctcaaacaaacaaacaaaaaaaccaaaatacacttagtttctgaaaattatatgttgtttgatccaacaatggaaatcattgttctagatccttcgatagcttaatggtgcagtgttgttatctgttatgaagtatgctactgaggtaggataaaactatgttggcaagaaatgattcattcatacttataaaatacatcaaattttattagttaaaacattaaatctatgatgcattcttaaatagtagcaaaatgtgattccagcagttaatgtaaatcctagtaacaaacatgggattctggttactttgattaaacttcttatgctcggccggccgggcacggtggctccagcccgtaatcccagcactttggcaggccaaggtgggcggattatgaggtcaggagttcgagaccagcctggcaaacatagtgaaactccatctctactaaaaatacaaacattagccaggcgtggtggtgcatgtctgtaatcccagctacttgggaggctgaggcaggagaatcgctaaaacccaggaggcggaggttgcggtgagctgagattgcatcactgcactccagcctgggcaacagaacaagactccatctcaaaaaaaaaaaaaaaaatcaatctttgctatgcaacagctattggcatttgatggagaaggtagcctccacttttctgcattatttgtaccacacatcagtccctaataagctattactctcctctaataaaaatccgagtgtcttcctggctctatttcatggtctactggtagagaatttctttctttctttttttgagtcagagtttcgctcttattgcccagactggagtgcagtggcatgatctcggctcaccacaacctctgcctcccgggttcaagcgagtctcctgcctcagcctcctgagtagctgggattacaggcatgcgccaccatgcctggctaattttgtatttttagtagagatggggtttctccatgttggtcaggctggtctcgaactcccgacctcaggtgatccacccaccttggcctcccaaagtgctggcattacaggcgtgagccactgtgcccggccagtagagaatttcttcccatacccacagtgctcttctgtcagaagaagggcacctgcagtgcaataaggatgatgagtgacatcatagttcatcatcctctgccctttccaagtgctctctaattcagactatatttaattttaaaaggcagagtcttttttcttcaggagcttggagagaaataatcctcacctaatgaagtgagtgagcccttccatcctttgattctttcccgaacaacaccatgttaggcgtataatcatgtataaaatcagcacattgcaaagttctggttggaagttataaatagtagccttttcaataaatcttaaatacttcaacaaaacattttataagctgaaagtaattggccatttccaaacatcctacaacctttgatatgtatcatgtaatgagttttaacacatttggacttctgattatgctgaagtatataatatcagagggttatgaggaaactagagactgagttctactcttcctatgaatcctcacctacagttgtggtccaggagtaatagtctcagcatgcatgttacgtttgtgtgacttcatcaaagatgtatcttttgatgcgtattgagctctgagacctggataaagcttctgtcatacatagtatattcacaggatttgaactctgatgtctgttaatgcttaaactcatcaggagtttgccacagtcactgtatttgtaagaattgtctcaagaatgaattctctgatgttgtgaaagaatttgtggctgaaaaactggccgcactcctttgtaaggttactttttttttttttttttttttggagatggagtttcactcctgttgcccaggctggagtgcaatggcatgatctcgctcactgcaacctccgcctcccaggttcaagtgattctcctgcctcagcctcccgagtagctgggattacaggcgtgcaccaccacacccagctaatttttgtatttttagtagagacagcgtttcaccgtgttggccagcctggtctcgaactcgagacctcaggtgatccccccgcctcggcctcccaaagtgctgggattacaggcgtgagccaccacgcccggcgtcctttgtaaggtttctatccactatgaattcttcgatgttttgcaaggtttgaattttgagtaaagaccttgccacattggttacatttgtaaggtttgtctccagtatggactgccatatgggtagttagggttgaacgaacactgaaggctttcccacactcattacacctataaggtttttctccagtgtgaattcttctatgatttgcaagatgtgaattttgagtgaagaccttgccacattcattacatttgtaaggtttttctccagtatggatgacctgatgggtagctaggtttgaatgtacactaaatgctttgccgcactcattacacttataaggtttctcaccagtgtgaattctctgatgaattgcaaggtacgaattgtgtctgaagaccttgccgcaatcattacatttgtatggtttttgtccagtatgtattgtctgatgtatagttaggcttgaatgaacactaaaggctttgccacactcattacacttgtaaggtttttctccagtatgaactctccaatgccttgcaagttgtgatgtttgactgaaggctttaccacattcatcacacttgtaaggtttctctccagaatgaattccccgatgacttgcaaggtgtgaattttgtgtgaagaccttaccgcagtcattacatttgtaaggcttttctccagtatgaattgcctgatgggtagttaggcttgatcgcacactaaaggctttgccacactcatcacacctgtaaggtttctctccagtatgaattcttcgatgatttgctaagtgtgaatactgagtgaaaaccttgacgcattcattacatttgaaaggcttttctccggtatggatgatctgatgcttagttaagtttgaatgcatactgaaggctttcccacactcattacacttgtaaggtttctcaccagtatgaattcgccgatgctttgcaaggtatgaattgtgcctgaagaccttgccacattcattacatttgtaaggtttttctccagtgtggattgtctgatgggtagtcaggcttgagcgaacactaaaggctttgccacactcattacacttgtaaggcttctccccagtatgaattcttcgatgacttgcaaggtgtgaattttgagtgaagcacttgccacattccttacatttgtaaggtttttctccagtatggatgacctgatgtgtagttagttttgaatgtgctctaaaggctttgccacactcattacacttgtaaggtttctctccagtatgaattctctgatgacctgcaaggtttgaaggttgactgaagacctttccacattcattacatttgtaaggtttttctccagtatggatgacctgatggattgttaggtttgaacgaacagtaaaggctttgccacacttattacactggtaaggcttctctccagtatgaattctcttatgacttgttagccgtgagttttgactgaagaccttgccacattcatcacatttataatgttttcctcgattattaggagacttctcaacttgattgtattcataaattttcccttcatgttgaaattgctgcagttcagggagatgtgactgaaagcttactccaagctgattttcaatatgcctgtttcctgcagcccttctatcacgttgagctcttctaccagggagattttctttttgcaacataagtactgttttataatttccttcatcatctttccactgacactcaaagtcgtatgtatttttctgaacttcctggaaggacaagcctacagtgtcacagctttcaagtctctccaacttcaccgtgtagaacgcttctcccatattgttcttcccctttggtggcaaatccgtgtttacacatttacaagagatatctgtaagatataaacaaccatagatttccagttaactatagtaggtaaataactatttcccattgaaaaacctaatgttacaccaaaagtaatagttatgttgaacagacttacgattcttcagaaccataattttccagaacacaaaaggaacaggattccttatcaaagaaaaggtggtaacatgtaattcaaatagtaggggatcctagttttaaacattctgtgaacaaaacactcatattgtgcaaacccatattagccctgaaaggagtatttttcaaccatgacccaaggctaccaattggcagtatattttatatggctgtcacagaattcaagagaaataattcttagattgtgcctatttaaagcatatttgttatgcataagtaaatgctgaagcacaacatgatatactctaatggcaaataactcacagcaaacatatgtaatgaataattaaagaactagtaattttgaattggaaaacaataatagcactgaaaaaacgaggaggaattcaattttaaaatgtcagaaaaaactatttttctgaatacctgttataaaactacatacccctatatacccacacagagcaaacattttgcaacattaacaagtggtatataacagttatatttctttctttctttctttcttttttttgagaaggacttttgctcttgttgcccaggctggagtgagtggtgcaatctcggctcaccgcaacctccgcctcccaggttcaagcgattctcctgcctcagcctcctgagtagctgggattacaggcatgcaccaccaggccagactaattttgtatttttagtagagacagggtttctccatgttggtcaggctggtctcgaactcccgacctcaggtgatccccccgcctcagcctcccaaagtgctggtattacaggagtgagccactgcgcccagccccaacagttgtatttcttacaaatggtaaaaaaccatcctctatcaataataatcgaaattaagaaaatattttagcaactcaggatataagcagtaggcaagaattagtaaccgtgtttacaggaagttatagtctgtggattgtcaacaatttctctctctttttttttggagacagagtctcgctttgtcacccaggcagtggcgcgatctcggctcactgcaagctccgcctcccgggttcccgccattctcctgcctcagcctcccgagtagctgggactacaggcgcccgccaccgcgcccggctaattttttgtatttttagtagagacggggtttcaccgtgttagccaggatggtctcgatttcctgacctcgtgatccacccacctcagcctcctaaagtgctgggattacaggcgtaagccagggtgcttggccaacaatttctcttgagaaaagaggagtctgccgggcgccggtggctcccgcctgtaatcccagcactttgggaggccgaggcgggtggatcacgaggtcaggagatcgagaccatcctggctaacacgatgaaaccccgtctctactaaagatacaaaaaattcgccatgcgttgtggcgggcgcctgcagtcccagctactcgggaggctgaggcaggagaatggcgtgaatccaggaggtggagcttgcagtgagccgagattgtgccattgcactccagcctgggcgacacagcctgactccctctcaaaaaaaaaaaaaaaaaaaaaaaaaaagaaagaaagaaagaaaagaggagttctacttcagaaccagcacaggatataagaactggaatataatttttttttatgaaataaaactgtctttatttgcagataacataatcatccttgagaaaattcaatatactctacaaaaatgctgctagaactagtgagtttagcaaggttgaagaatacattatcaataccccaaagaatcaattttatttctatatactagcaatgaataatcagaaagttttctaaaatgcagtttgcaatagctttaaaaacattaaatacttagagaaaagtccgacagcagatatgaagaacctatacactaaaaactataaaatattgcagagaggaattaaagaagacctaaataaatgaaaagctaaatatatcttgttcagcatttagaagactcaatattgttaaaacagcaacactccccatttagcctattgattcaacacaatcccaaccaaaattccagcatgtattttttgagaaattaacaggctttctaaaattcataggaaaatggaaaggatctagcataattaaaacaattttgataaagaagaaagttgtaacactatcactacctgctttcattataaaagtgtagtcatcaagacagtgtgattattgttgattagacaaatatcaaatagatcaatggaatgaaatagagaatactgaaatagactcacgttatatagacaactgatttttgacaaagaataaatggcaattccatggagaaaagacagtctttttaaaaaatggtgctgaaacaattagatcttcatatgcaaaaaaacccttttgtttatacctcattccatatagaaaaatatactcaaatagatcagatgaaaacctaatgtaaaatctaaaccataaaacttttagaaaaccaacatgaggaaaaatctgtggagccctcggatcaagcaaagatttcctagatatgataccacaatcatgatccataaaagaaaaaaaagaattaatttataaagacacactgttaaaagaatgaagactcggactgagggaaaatattcacaaagcacaaatctgataaagactttgtatctggaatatacaaagaactctcaaagttcaatattaagaaaacaaaaagcccaattttaaacattggaaaatgatttgaacatacactgcacaaaagaaaatattaatatatatagataataagcacattaaaagatattcaacatcatagtcattaggaaaatacaaattaaactactaaatgttgattagaaaggctggaatttaaaactagcaataccaagtgttaacaaggatgtgaaaaaactaaaattctcacacactggtagtgggaatgtaaaaggctacaaccactttggaaaataggttggatggctttaaaaaaaatttttttaatggaaatatttctttttttattattattactatactttaagttttagggtacatgtgcataatgtgcaggttagttacatatgtatacatgtgccatgctggtgtgctgcacccattaacttgtcatttagcattaggtgtatctcctaaagcctatccctcccccttccccccaccccacaacagtccccagagtgtgatgttccccttcctgtgtccatgtgttcttattgttcaattcccacctatgagtgagaatatgcggtgtttggttttttgttcttgcaatagtttactgagaatgatgatttccaatttcatccatgtccctacaaaggacatgaactcatcattttttatggctgcatagtattccatggtgtatatgtgccacattttcttaatccagtctatcattgttggacatttgggttggttccaagtctttgctattgtgaatagtgccgcaataaacatacgtgtgcgtgtgtctttatagcagcatgatttatagtcctttgggtataaacccagtaatgggatggctgggtcaaatggtatttctagttctagatccctgaggaatcgccacactgacttccacaatggttgaactagtttacagtcccaccaacagtgtaaaagtgttcctatttctccacatcctctccagcacctgttgtttcctgactttttaatgattgccattctaactggtgtgaggaatggaatataacttttttaaaaaaaacttttattgtataatggcaaactacaggtgtatatatttatggggaaaaaatgatgtcatgatgcatatatagaatgtggaatgatggaatcacgcttattaccacatccatcatgtgaaaaatgtgtcatttactcttgtttaattgaacctttgtgttgaaacgacaaacatcttcctaatctccccaaccccaccctcttgtaaccaacgttcttctttctatgagttcaagaggtttggattccacatataggtaagaaggtgcagtacttgtatttctgtgcctagattatttcatttagcaaaatatcctcggggtccatccatgttctggcagacagaacttccttcttttaaaggctacacagtgttccatcattttctttatccattcatctgttaatgaacacgtagtttgatttcataactcgactattgtgaacaatgctgcattaaacatggaatgcagatacgtcatagatatgctgatttaaatcctttggatctatacttgacccttggacaatgtaggggttaagaatgccaaccctccactcagttgaaaatctgtgtataacttttgactccccaaaaacttaaccactaatagcctacgattgactggaagctttactaataaacatataatgtcgattagaatgtatcttgtattttttatgttatatgtattatatactgtattccttttttgtttgtttgtttgtttgttttcgagacggagtcttgctctgtcaccaggctggagtgcagtggcacaatctcacctcactgcaacctccacctcccgggttgaagcaattttcctgcctcagcctcccaagtagctgggattacaggtgcccaccattaggcccagctaattttttatatttttagtagagacggggtttcaccatgttggccaggctggtctcgaactcctggcctcacatgatctgcctaccttggcctcccaaaatgctgggattacaggcttgagccaccgcatgcggcaagagatcactttttattatgatatgcaatttactggagagatgaactacttaaagatgattagcgttacagagtgtattaagcaaatacttgcaacacttgagctccatgtaatagcaataggaggtggctatgaaattgtatggcagtacactatgtactaaaattagttctatacaattatgattattatatctttacatttgtgtgtgtgtgtgtgtatatatatatatatatatattttttttttttttttctttttttagacggagtctcactgtgtcacccaggctggagtgcagtggcgtgattttggctcactgcaacctccgcctcccaggttcaaacaattctctgcctcagcctcccgagtagctgggattacaggtgcctgccaccacgcccagctgatttttgtactgtatgtcacatgcagtaagtgtgtgtataagttttaattttttatgatagatttgtgtttttattttgaaagagagtctcattctgatgcccaagctagagggcagtggtgtgatctcggctcactgcaacttctgtttccctggttcaagtgattctccagcctctgcctcccacctagctgggattacaggcatgtgccaccacacccagctactttttgtatgtttagtagaaacagggtttcaccatgttggccagctggtctcgaactcctgacctcaggtgatccacacaccttggcctcccaaagtgctgggattacaggtgtgagccaccacacccggccagatttgtgtattttttatggtggtaaataatagagtaataatttatgcattcatgacatacctaattttttcttaatttttataatatttttaggttatgcaatttgtctgctttttcaaattgttggaaatgtctttaaaaatttccaatatatttactggaataaaacccatatataagatgacccatggaattcaaacctgtgctgttcaagggccaactgtatacccagaagtgggattgctggataatatagtacttttatttttatttttttgagaaatttccacataatttttcataatgcctggactaatttacattcaaccaatagtgtatgagaacccccagtctccatatctttgctaacacatatcttttgtcctcctgacagtagccattctgacaactacgtgatattttatgctgctttaaatttttatctctgcaagtagtgatgttggctgtttgtctgccttccttcaagaactgtatattgaggctcatacctgtaatctcagcactttgggaggccaaggtggatggatcatgtgagaccaggggtttgagaccagcctggccaatgtggtgaaaccctgtctctaccaaaaacgcaaaaattagtcaggcgtggtggtgcacgcctgtagtcccagctacttgggaggctgaggcaggagaatcacttgaacctgggaggcggagattgcagtgagccaagatcacgccactgcactccagcctgggtgacagagcgagattctgtctcaaaaaaaaaaaaaaaaaaaaaaggaaataaaatgtatattgagatcccttggccattttttaaattggtttgttttcatgctattgagtagtttcgatttctcacacattttggacattaaattggtgtcaaatatacaaattgcaaatactttctcacaatccgtaggttgtctcttcattatgttaattgttccctttgcagtgcagaagcattttcagtagatgctaccccatttatctgtttgcttttgttgcacaagcttctgggctcaaggccaaaaaatcattgataacgtcatgtaggttttcccctatgattacttctagtagttttacattatcaggtcttacgtttaagtatttaatacattttgaatcaattttggtatctggtgtgagattaacatccatttcattctcctgtgtgtggatattgcttttttctagcaatacttattgaaaaaactgtccttgttttaattgtgtgttcttggtacctctgtcaaaaggcaactggccatatatccatcattttttttttcactctttttttttttttttttttttgagatggagtctcgttctgtcgccaggctggagtgcagtggcacaatctcagctcgctgcaacctctgcctcccgggttcaagtgattcttctgcctcagcctcccaagtagctgggactacaggtgtgcaccaccatgcctggctaatttttgtatttttagtagagacagcatttcaccatattggacaggctggtctcaaactcctgagctcgtgatccacccacctcagcctcccaaactgctgggattacaggggaaagccaccgcatctagcattttttactctttttattctgttccactggttgatgtgtctatttttaaggaagtactatcctgttttaattactatatcttcataatacagtttgaagtaaggtagtgtgatgcctccaggtttgttttgttcaatgaatcccatgctcaagtgtgaaaaaaacaggatacatgcccgatgtaggactgggatcaaagagaggacatttctgtccactgtacttaacaatttggctaaccatctcagaagatccaacccactccccttgtcacccacacccacaaactgtcacaaagtggaagagaagaagtagctgagacctcaacaggcaaggaaagcttaagacagttccgtgaagtttccggggccccaggtgcaaaggagaagcagccagtgttttccatctcttggaagtaggtcttccaagctcatgaaatgggataaagtatggatagaggcacttgccaaaactatggagtcctcacatctgtctctgtggacagaaaaataaggatttttgattgaatcaagcacagaaggagagactaaggaggagagcaacccttttgaaagggactaagagttcatagaaagccagtaacagacggttgtagatcatgaccaagactttgcatgtgttgctctttgggctgtagcgccactgcaggttggaaggatgaagttttacacatctaaagaacagggtattaagtggtagggaaaaaaattcttatcagtgatcacaggatataaacttttattttcccaaaaaactctcccatttgcagggtgtttctcaaacactgtctaatgagatgctttctccctgcccatctgaactctgacctgtgatcccacctctgatccactcccagtttctattgtctcttggttctccacattccagggctccttcccttgttccaacaaggagataatactcagatcaaaaggagagattcctgcttatgagaagaaagaaggccaggcatggtggctcacgcctgtaatcccagcactctgggaggctgagttgggcagatcacctgaggtcaggagttcgggactagcctggccaacatggtgaaaccttgtctctattaaaaatacaaaaattagctcggcatggtggctaaagcctgtaatcccagctactcgggaggctgaggcaggagaatcgcttgaactcaggaggcggtagttgcggttgcagtgatccgagatcgtgccattgcactccagcctgggtgacaagggtgaaactccgtctcaaaaaaaaaaaaaaaagaaagaaaagaaagaaagaaaaaaaaaaagaaatataatgtgctgtggcttttccagaatcgtacccttaggtttacatgagaagagaggaaactgtagacggatttggaaaaacatttcaacagttgatccacggaatgcctcctgagtggttaggaaacaccacactacgcagatatctagctttcttccatgaaccactcaatcaaaagcacagaagtagaaaacagaaaatcaaacattttaaaagtctggtacaaggtattatgcatacaaaactctaaaactctccacaaagtgggcagaccatctcgagaaacagcaagattaaagtccagatcctgcatgattaggcttttcatttatgagtcaacaggacatcaatcctcatcaagcaatgcaggggctctcaagagactcacaagggaaaatgaaaacatacacgagaacagaccctgacttctaaaagaaagtcatcctcacccagggagaccaggttcctataattctccaacatgacgtccctgtacaaagtcttctgagcagggtccaggcatgtccactcctcctgagagaattctatggccacatccttgaatgtcaactgtccctaaaatgaaaaacacatttcaccaagtgactatgaggaaaatttgaatcttcacataaaacaagaagaggagagagctgtaagaataggttcaattcacgtaagcagactgacacatccaggctgtgatcacggtacatacagatttgatcttcctccccttttcctgaaaagggctcacttgaaatctgtgaggtgataagtatctttttgtatgtcagtgaggctaactggtggctgaaggctgctagatagcttcagggtgtgggctggacactggaaagaccaaggcaagattacagggttaggctgggagccattgctcatgcctgtaatcccagcactttgggaggccaaggccagtggatcacttgaggtcaggagtttgagacaagcctggccaacacagtgaaaccctgtctctactaaaaatacaaaaattagccgggcatggtggtgcgtacctgcaatcccagctactcaggaggctgaggcagcagaatcacttgaacctgggaggcagaggttgcagtgagccgagatcacagcaccacactgcagcctgggtgacagagtgagactctgtctcaaaataaataaataagaataaaaataaataaaagattacagggttgggacttccaggctcaatctccaacactgcaaaagggaagaagggctgaaggttcagttgaacatccatggccaataatgtaaacagttatgcctatgtaatgaaccttccacaaaaatgcaaaaaattaaggttctgaggagcatctgggacagatgataacatggaggctccttgagtggtgcacccacagagggcatggaagctcagagccccttctccctatctcacccaatagatcgcttccacctgcattctttgttatatcctcagcaataaatgaatcaatatgaatcaagtcttcccctgaattctgtgagccactctaacaaattaattgatcccaacgaaaaggtgatgagaatttacaacttaagccagttagtgagaaacccaagccacaatctgtgtttgtgaatggcaatgaggtggctgcacccttgtgggactgagccctacacctgtgggatgtgatgccatatccagacagtgtaagaactgaactgaatgggaggacacccaggtcatatatccacggcagaactgcttgattgatgtgatggaaaacccaacacatctgggagaacggaagcattctgtgttgcaagagtacagtagaagaaactgaatctggctgggcatggtggctcacgcctgtaatcccagcactttgggaggccaaggcgggtggatcacctgaggtcaggagttcgagacgagcctggccaacatggcaaaaccccgtctctactaaaaatacaaaaatagccaggtgtggtggcaggcacctgtgatcccagttacttgggaagctgaagccggagaatcatttgaagccgggaggtggaggttgtggtgagctgagatcacaccattgcactccagcctgggcaacagagcgagattctatctcaaacaaaaacaaaaacaaacaaacaaacaaaaaactgaaccagtttttccctatattctcacacactaaaatttatttgagcaagttatgtctgtttaatcctgtttcattattcttttccctaagaggttatgatatcctctaaattagtgtggatttgttttgtggacaataaataaatatacagatacaaaatcagctgggctcagtggctcatgcctgtaatcctagcactttgggaggccaaggtggggtaatcacttgaggtcaggagttcgagaccaacctggccaacacagtgaaacgctgtctctactaaaaatacaaaaattagccggaaattgcttgaacctgggaggcagaggttgcagtgagccaagattgtgccactgcactccagcctgggcaacagggagacaaacaaaacaaaacaaaacaaaacaaaacaaaacaaaaaaacccagcacaagtttatctctaccagtgttagatagatattatgtcggacacatcaagcaatattcagcatctagatgacctagagaatgagtggtgtcttcaacgatgataatatccacagtggctttgaagaaaaaacaagtcagagccttaaaactatgatgagagcaatagcaatgacagggatttaagaacaatgcccatatgcaaggtagtattttaaatcctttacgtgtactaacacatacaacactgtagcccatgagagaaagatctgctcccattttactgtggggacaactgtttcacagacacactgagaaacctgtctcaggtcaaaggactaaaaatgacagagcaagtacctgtacccaggtgtctaggaattaaaattaaacctaagcaatcagttaagcaacaggcaagctacctgaaagagcagctcgcaatgccctgaataatcttccaaagagggtaagtaggcggtttggaatgctaaagcattaaggaaggctacatagtcaagaagagccttcagagttttcattttagaatctcagtgtctgagatcagtacaaaggagtcaatgtatctgtccaaggttctgaaagggtggtcattttggaagaattcatttatgtaacgacgtgtaccaatgtctaatagattcccaacatccttttgtgcaacatctatcagcagctgctcacgttctactgtgaatgactgacatgtagattggtctgaatagtttcttggtcattaaactggttagaaaagaactttcccagtcttttagatgctacactgtggctgaaatcctctgaactactgtgaaaatgaggtttacaaaataaagaaattggccaggcatggtggctcatgcctgtagtcccagcactttgggaggccaaggcaggcagattgtttgaacccaggagtttgagaccagcctgggcaacatagcaagaccttgtttctacaaaaaagtaaaaattattaaaagtaaaaataaataaatacaaacaaataaagaagtacaagaaatgagagaatgttggagaatgaagggtaaaatgatgtcgagcaaaactggccacagaatgtgttaatatattcaagttcaaatagtgttttatgaagaaagagactttaaaatctcaggggtaagcaaatttaaactgaaaacagaataaaaagtcctagaaagatacagtaaaaagtagtgtctgtctctttgcataaagtagtataatatagtttgcataaagtagtataatatagtttgcacgcatttggaagacaaccagctggcaggggaattatctcaaagaactacacaggagccaaatgagattatcaaggacaacaaaccacttcctttattacaaggtcacacttatagaaaaaagcacatgtaaaaacctaatttcagcactgaattcaggactttctcactggaaatttgggtagaatcaaaagagaaaacaaagataaaagtggctatgagttttggctgagcacagtggctcatgcctgtaatcccagcactttgggaggccgaggcgggtggatcacgaggtcaggagatcgagaccatcctggctaacacggtgaaaccccgtctctactaaaaatacaaaaataaattagccaggcgtggtggcggacgcctgtagtcccagctggtcgggaggctgaggcaggagaatggcatgaacctgggaggcggggcttgcagtgagccgagatcgcaccactgcactccagcctgggtgacacagagcgagattccgtctcaaaaaaaaaaaaaaaaaaaaaagtggctatgagtttatgagttttgtataaatatgtaaatttatttcttttttttgtttttttttttgagatggagttttgctttgtcacccaggctggagtgcagtgggttcagggagcttccagagggctgacatgtggaggttcctggaggacggcatacccagggagggcagggaagctctgcgcccctttccccatacctcaccttatgcatctcttcactggtatcttctgtaatagtatttataatcaaccagtaaaactgagtgtttctctgacctctaagagttgctccagcaaataaatccaacccaaagaagggttcatgggaacttcaacttgaagttggtcggtcagaagtttcagaggcctggacatgcaactgggaactgagccatcaatctgtgagatctgacactatcttcatgcagacagtgttggaactgaactggaggacagccagttggttgcttgctgtttgttggtggggagaaacccctcgcatttggccacagaagtcttctgtgtggattgtggtgttggtgtgagagcagaggaaaacatggtttttgagttgtttttcctaaacagcaccaaaagtaaattaacatgaggtcacctaactgagaaaaactgaaacaagttcaaggctaacaatatggaatttcaccaaaggtcattatatacacaaacgcatttatgtccatatattactatcctattagttcattaatagataatagagaacaggctgggtgtggtggctcacacctgtaatctcagcactttgggaggccgagttagatggatcacctgaggtcaggagttcgagaccagcctggctaacatggtaaaaccccgtctctactaaaaatacaaaaattagccaggtgtgatggcagacacctgtaatcccagctactcgggaggctgaggcaggagaattgcttgaacctaggaagcagaggttgcagtgagccgagattgcgccccttcactccagcctgggcaaaagagtgaaactccatctcaaaaaaaaaaaagacagtggagaacaaatttaaggccacagaaaatatttaaaatatgatttcaaatgataaaacacatacaatttatttaaatgatggtatgtcttttataaaaccatgggtgtatgcatctacatattcatgtgtgcacatcacatataccagttaaattaagtgaaataaggagatgtgtctcaatgatgtatttttttttatgacatctttagttgtcttttttgctcatgtgcttttcagaaagtctgggacaactgaaatgcatgaattgtacttgatttagtttacaaacatttttgtaaattaagctgtaaaaacgctaaaacaaaaatatgtaagaacttgtactccaattggtattaaatacaaatattaaaagtacagataccatttttttccagttaaatttagatatttaggcattaacaaaagcccaatggaggttttagtttattttactcatgaaatcctaagattaggacattttttaatatcatacatgaatagatttcagaagtacatattgcaacaatacttactcaaagaaattattggataattaaaaatcagtccaaaaaggaaatttgaaaaacacccaaaagctaatattaaacaagaaaatttcaccaaacatcataatcaagcagtaaatgctggatgcatttgatctaaattaaaatggagaaaatgggctgggcatgatggctcatgcctgtaatcctaacaccttgggaggccaaggcgggtggattgcttgagctcaggaattcgagacgatccttggcaaaatagtgagacccccatctttacaaaaaatataaaaattagctgggtgtggtggcatgcacgtgtagtcccagctacttgagaggctgagatgggaggctggcttgagcccaggaggtggaggttgcagtgagccgagattgcaccactgcactccagactgggcgacagggccggaccttgtatcagaaaaaaaaaaaaaggagaaaatgggggctcaccaaggctccagctaaagcccacttcagagcatgcctgagctgagaccaagaaaaaggtaaagtaggagctggatctgttaaaactaacagatgacatactcacaacccaggagaagaatgcattgaagtttaagaactaataacaatactgtgaaaacaatcttcattctttctttagcagctctcattagacacaaacacacaatgcatctcacgagtacattaggaattatacaatgctacctattaaaatacgtttccagacctatttaaagaaattataagactgtactaaagtgatgatgtcaataaaatagaggactagaactcccaaacactacctccaccacggagacacaaatgtagtagcaatatatgaaccaattgctttgtgagaaacccagtggtcatttaagaggttggaactcttaacagaagtctagtaggaaaatacaggacatctgctcccagaggccttaccctggcatgatgcagtgtcactgcaagaaaaacaccaatttcccatttctcctgggagaggaaaagtatgaaaacattcatccaatattctgtcttttcagggcgctgcctgagggataagtttctctcttggttgaatataagtaatgaaggccgggcgcggtagttcacgcctgtaatcccagcactttgggaggccgaggcgggtggatcgcttgagctcacgaattggagaccggcctgggcaacacggtgaaacaccatctctattaaaaatacaaaaaaaaatagccgggcatggtgatgcatgcctgtagtcccagctacgcagggggccatggccagagaatcacttgagcccaggaggcggaggttgcagtgagctgagatcgcgtcactgcactccagcctaggcgacagagcgagactctgtctcaacaaaaacaacaaaaaaaaggagtttggagtcagaaacacagtgactcacttgttcggcatcaaatgcaaatataaatgaggtgacaaagctttccccacagtcgtctcattttacagcatttcgtgggtgcttgtacacactaacatctgacttcataaccagcttctcttatcacagtttacacagagctgtcaatatattcaaatatgtcctgaacaatccctgttgcccaacagcactgacaccacgggaccctcaccccgtctccatccatgtcggggtgtgagcccttcccaggtccatgccccgtgcagcctcttcccaagttcatgtcactgggtcaccagagatggaatctaagtgagatgagagggactgagggaaggcacgagtgagtgcgagcaaacctgtcaggcaggatgcttcagactcagagaagattcccaactccaaggtccaaggtttctgaaaggaaggagacagaacaatccaccgagaatatcatctcacctgaggaagagccatccctgactcctttgccttcctcttcctcttcttccagggttctaccttgggtaacatgaaagagactttagaattcaatcctgaatgtcaaaaatacgctgtttgttggttagaatcaacacaccccctccctgggccataaccttatacacagggaagaccttatacacagggaagatggtcctctgctgcccactgcaccagaaaagatgcagggatgagaaactcctacaggaaaaacaagtgagtttctgacctctttctttagaacccactcccctcctggagaagcccccacacaggctgcagcagtggggagctgggctggaatgagcttctgttcggggcacagacccagccctgaccaaaccccatgctgagcacagtccctctcccctctgtgagtcataggctgatctcagccttcagaaatgatcagcagtgccctggtgctcaatagtagatacagaataacagaacagaacaaatcttaaatgtcactgaagctgggctgcaacttatctgaatgaaaatctctgctaagggggcgtaagagatgtatttgcaaaatgcctcagcattcttgagctccactgagaggggccgagcccagcacagcccccccaccttctggctgtactttccctgggggccttgtcatcaggatccagacagtggaaggtgaagcagcacagagaaacacgcagaacagccaatacagacaagaggtgagggtgggggtggggatggaatgctgaagcgggggtcagggagagggtcacggaagtccccactgaggaagtgatatcagaacaaagacctgggttaggaagggtgtttgcacctgcacctgaggggccagagtcctaggcagagggaccacccatgtgaaggccctgaggcaggagcaacttggggaccccggaaaaggaaaggggcctgagtggctggagcagagggagcaaggaggcacaggcaggagacgaggtcagagaggtcctgggggagcaggtcagggagggctgaggtcttcaaacagtttttctcccacacctccaaagaatgtttaagctgggcgcagtggctcttgcctgtaatctcagcactttgggaggcagaggtgggtggactgcttgagctcaggagtttgagaccagcctgggcaacatggcaaaaccccatctgtaaaaaaggtacaaaatttagtcaggtgtgttggtacgtgcctgtagtcccagctacttgggaggctgaggtaggaggatggcttgaggacaggaggtggaggttgcagtgagccaagatcacaccactgcagtccagcatgggcgacagagcgagaccctgtctcaaaaaaaaagactagaagaaataataaataatttttaaaacactggatttctttaatccacttatcttatttttaactcgcaaataatgtcatatcttctctattttaaatacatgctgacatgttcagctaagccccaagaagtacagggtggcccccatccaccctgggtctgctggggaacacctttgggggaattcaggatgacccttttggacatacgaaggtggagatgcctgttccacctcccagcagagtgttgaggagacaactggacaaaggattccagtgttcaagggagaagtctgcagggaacagggagccgtgtaggtgggtttaaagctgtgagatgagatgataaggaagggcatgggttgtagggtccggccccacaggattggtgggttttctcctcgtgtgtggagacgagagagcttagaaataaagacacaagacaaagagataaaagaaaaggcagctgggcccgggggaccactaccaccaagacgtggagaccggtagtggccccgaatgccaggccgcgctgatatttattggatacaagacaaaggggcaggataaggagtgtgagccatctccaatgataggtaaggtcacgtgggtcacgtgtccactggacagagggcccttccctgcctggcagccgaggcagagagagagaggagaaagagagaaacagcttacactattatttctgcttatcagagactttttgtactttccctaatttgctactgctatctaaaggcagagccaggtgtacaggatggaacatgaaggcggactaggagcgtgaccaccgaagcacagcatcacagggagacggttaggcctccggataactgcgggcgagcctgactgatgtcaggccctccacaagaggtggaggagcagagtcttctctaaactcccccggggaaagggagactcccttccccagtctgctaagtagcgggtgttgttccttgccacttacgctaccgctagaccacggtccgcttggcaacggacgtcttcccagacgctggcgtcaccgctagaccaaggagccctccggtggccctgtccgggcatgacagagggttcgcactcttgtcttctggtcacttctcactgtgtcccctcagctcctatctctgtatggcctggcttttcctaggctatgattacagagggaggattattataatattgggataaagggtaactgctacaaacaaatgattaatgatattcatatataatcataactaagatctatatctggtataactattcttgttttatattttattatactgaaacagctcgtgtccttggtctcttgcctcagcacctgggtggcttgccacccacattgggtgtggacaggaaccaagaagctcagggagtaagccgtgcatagtccacatttagggaacagaaaaatcaagagacaccagaagaggaaagcgtgacgtgatcagcgaggtatcaaaaacttgaaaacaaacagtttaaaaaggttaatggtatgtccttaaagccaggaaaacagaagagaaagtgagaaaagaaaaaaaaggaacacaaagaagtttttgtgtactattctcttaaatagagcatagaagaggggaacttactacagaaggaaaagtagttaagggttttttttttttttttttttttttttttaattaatttattttttttttattgatcattcttgggtgtttctcgcagagggggatttggcagggtcataggacaatagtggagggaaggtcagcagataaacaagtgaacaaaggtctctggttttcctaggcagaggtccctgcggccttccgcagtgtttgtgtccctgggtacttgagattagggagtggtgatgactcttaaggagcatgctgccttcaagcatctgtttaacaaagcacatcttgcaccgcccttaatccatttaaccctgagtggacacagcacatgtttcagagagcacagggttggggataaggtcacagatcaacaggatcccaaggcagaagaatttttcttagtacagaacaaaatgaaaagtctcccatgtctacttctatccacagagacccggcaaccatccgatttctcaattttttccccacccttcccgcctttctattccacaaaaccgccattgtcatcatggcccatccccaatgagccgctgggcacacctcccagacggggtcgtggccgggcagaggggctcctcacttcccagtaggggcggccgggcagaagcgcccctcacctcccggatggggcggctggccgggcggggggctgacccccccaccaccctcccggacggggcggctggccaggcagaggggctcctcacttcccagtagggacggccgggcagaggcgcccctcacctcctggatagggcggctggctgggcgggggggctgtcccccccacctccctcccggacggggcggctggccgggcagaggggtcctcacttcccagtaggggcggccgggcagaggcgcccctcacctcccggacggggcgactggccaggcggggggctgatccccccacctccctcccggacggggcggctggccaggcggggggctgaccccccccacctccctcccggacagggcggctggccgacccccccccccccgcctccctcccggacggggcggctggccgggcagaggggctcctcactttccagtaggggcggccgggcagaggcgcccctcacctcccggacggggcgactggccaggcggggggctgatccccccacctccctcccggacggggcggctggccaggcggggggctgaccccccccacctccctcccggacggggcggctggccgggcagggggctgaccccccctcccccctcccggacggggcggctggccaggcggggggctgaccccccccacctccctcccgggcggggcggctggccgggcagaggggctcctcacttcccagtaggggcggccgggcagaggcgcccctcacctcccggatggggcggctggccaggcggggggctgatccccccaactccctcccagacggggcggctggccgggcggggggctgaccccccacctccctcccggactgggcggctggccgggcggggggctgacccccccacctccctcctggacggggcgtctggccgggcagaggggctcctcacttcccagtaggggcggccgggcagaggagcccctcacctcccggacggggcggctggccgggcggggggctgacccccccacctccctcccggacggggcggctggccgacccccccccccgcctccctcccggatggggcggctggccaggcagaggggctcctcacttcccagtaggggcggccgggcagaggagcccctcacctcccggacggggcggctggccgggcggggggctgaccccccccacctccctcccggacggggtggctgctgggcggagacgctcctcacttcccagacggggtggttgccggacggaggggctcctcacttctcagacggggcggttgccaggcagagggtttcctcacttctcagacggagcggccgggcagagacgctccccacctcccagacagggctgcggcccagcagaggcgctcctcacatcccagacagggcggcggggcagaggtgctccccacatctcagacgatgggcggccgggcagagacgctcctcacttcctagatgggatggcggcggggaagaggcgctcctcgcttcccagatgggatggcggccaggcagagacgctcctcactttccagactgggcagccaggcagaggggctcctcacatcccagacgatgggtggccaagcagagacgctcctcacttcccagacggggtgggggccgggcagaggctgcaatctcggctctccgggaggccaaggcaggcggctgggaggtggttgcagcgagccgagatcacgccactgcactccagcctgggcaccattgagcactgagtgaacgagactccatctgcaatcccggcacctcgggaggccgaggctggcggatcactcgcggctaggagctggagaccagcccggccaacacagcgaaaccccgtctccaccaaaaaaaaaaacgaaaaccagtcaggcgtggcggtgcgcgcctgcaatcgcaggcactcggcaggctgaggcaggagaatcaggcagggaggttgcagtgagccgagatggcagcagtaccgtccagccttggctcggcatcagagggagaccgtggagggagagggagagggagagggagagggagggggagggagagggagagggagagggagagggagagggagagggcccctttgtttcttataggagatgctgggtaatccagattaaatttttgaccgggtttttgttttttttgagatggagtctagctgtgtcacccaggctggagtgcagtggtgtgatctcagctcactgcaagctctgcctcctgggttcaagcgattctcctgcctcagcctcccaagtaactgggattaaaagtgcacatcaccacggccagctaatttttgtatttttagtagagaagacgtttcatcatgttggccaggctggtctcgaactcctcacctcaggtgatctgcttgcctcagcctcccaaagtgctgggattgcaggcgtgagccaccatgcccagccttattttttgttttaaagttgaaagagtagatgagaaagaaaggctttattttctgtgtgtgtgtgtgtgtgtgtgtgtgtgtgtgtgtgaatagacaagaccactaatctggatatgctcatcaaaataattcccttgaagtaaaagttgacacagtggaggagggagccacaccgtcctgagactgtggtgcaaaactgaagagccagctgtagggaccagccccacagggtcagtgggtctctccccgtgtgcagcgacgagagagtgtagaaataacgacacaagacaaagagataaaagaaaaggcagctgcgcccgggggaccactaccaccaatgcacggagaccggtagtggccccgaatgtctggctgcgctgttatttattggatacaaggcagaaggggcagggtaaagagtgtgagtcacctccaatgataggtaaggtcacgtgggtcatgtgtccactggacagggggcccttccctgcctggcagccgaggcagagagggagaggagacagagagaaagacagcttacgccattatttctgcatatcagggactattagtactttccctaatttactactgctatctagaaggcagagccaggtgtacaggatggaacatgaaggcggactaggagcgtgaccaccgaagcacagcatcacagggagacggttaggcctccggataactgcgggcgagcctgactgatgtcaggccctccacaagaggtggaggagtagagtcttctctaaactcccccggggaaagggagactcccttccccagtctgctaagtagcgggtgttttcatttgacacttacgctacccctagaccacggtccgcctggcaacgggcatcttcccagacgctggcgtcaccactagaccaaggagccctccggtggccctgtccgggcataacagaaggctcgcactcttgtcttctggtcacacctcactatgtcccctcagctcctatctctgtatggcctggtttttcctaggctatgattatagagcgaggattattataatattggaataaaaagtaattgctacaaactaatgattaatgatattcatatataatcatatctaagatctatatctggtataactattcttgttttatattttattatactggaacagctcgtgttctctgtctcttgccttggcacctgggtggcatgccgcccacagccagcaacagcccggagcagggacagaccattcccagtacctcctgagttgagattgcaggccttaagacaggtgggtgggcccgttggagagctcttccctttactgtttgagacaggaaaaaattaaactgttcatactattgtcacactcaacccagaatacttcacttgtagtcaccaaaatgtgtgcagtttttcccacaatgaccagttctgcagtgcactcccagtggtgggtcctacaatttcactccactctgacactgtcagttctcccaggtgaagatctcagtgtgctacatgctactagtagctgttggctacactctcaccagataaataccgtgattctcttaaccccttccttggattcaattaacttgctaaaaccattcatctgtatgcttcgtagtatcctttataacaattaggtaggccgggtgcggtagctcatgcctgtaatcccggcactttgggaggccaaggtgggtggattacctgagatcaggagttcaagaccagcctggccaacatggtgaacccccttctctactaaaaacacaaaaattatctgggtgtggtggcggacgcctgtaatcccagctacttgggaggctgaggcaggagaattgcttgagcccaggaagcggaggttgcagtgagccaagatcgtgccattgcactccagcctgggtgacagagcaagactccgtctcaaaaacagaccggcaaacaaaaaacaattgggtaaaccaaggaaaatgtttccctgagttctatgagctgctctggcaaattaatagcacctcaggaagggatgaggagaatcccaaatttatactcaatggatccgaagctccgaatctgggacttggggctggtatctgaagagggaaccctcaactagtgggatctaatgctaactctgggtagacagtgtccgaattgaattaaattattggacagtcaggtagtgtttgttcaagaactgcgtgttggtgaggagaaatccccaccccacacgttttggtgatgagaggcgatgcattctttgttgagcgttcattacttgattatgagagtgggaaaaacactttggtttttcctcctcactcatacacttgcctacacattaccccatcctaggaaaaggaaagagggtgacccataactgaatgagtcaagtcactgctctcttagaacagagattgcaaatagaagctaacctctgatgccaggaattataaaatgcacatgtcttatagacaaaacttttgtgattctcaccagcatctccataacagaaacaaaatatatacatataaaatttgttagattattaggggctgggcacagtggctcatgcctgtaatcccagcattttgggacgctgaggtgggtagatcacctgaggtcaggagttcgagaccagcctggtcaacatagtgaaaccccgtctctactaaaaatacaaaagttagccaggtgtggtggtgcatgcctgtaatcccagctactcgggaggctgaggcaagagaatcgcttgaacccaggaggcggagttacagtgagtcgagatcgtgccattgcacgccagtctgggaaatagagtgagattctgtcttaagaaaaaaaaaatttgttagattatggatacagaaatcaatatatcacgatgtaattatccatatccaatgaaaccaccatgcatctgggccatagtccccctctttcttccttcctgtgtgtttccctccctcattctgtacatctctctcattctcttcttctctctccttgtttcttttctgtgtttcagcctgggtctctgctcctcattttgagcccctctcttctcctgctgtttctccttccctctatccttctcttccacttgttctgttccattcttgcaacttgtttcacctcttattcctctttcacccgtcttttggttgtccccaatctccatctatttctgcctctttcttcccttatctctgctctccctgttaaatcccctcttccctgtttcacttccttgtccccactctttggcacccccagatcccaggtctccccctgctgtggttctccctctgctctccttgtcaccagctgccccttcttgctgtcccagcaccacgctgctctgtctatcctggctccaaataccccctcctctccctaactctccgtctgaggagctgcccctctccctaccttgctgtccttcatctctctagacagcgagcttttctctacatttctccagttgtttctccatcctgttactttctcagcgacttctttcacccttactgtctctttgtaaatcctgacccatcctctactttgccatgtttactggtttccctcattctttcctctgtctccgtttttctacttttctctcagcccccctctctgtctcctgatccccttggcccacacattcacagggagggtttggagtaagacacctggatcctggaggagcacattttccagcgggtggagctgggcaggcaagaacaccgggtatcacaggacaaggcccgggcacctccccaacgcgggctcaggggaaacggtgactgcgaaggggaggcctagggagcagcagggcccggcacgaggaggagggaggtggggggcgacggcgccttaggagaggggtggggtatgcaggatcccaggaccaggcagaggcgcggcctccccgggactggggctgcggcgctaacgctccagtagctgactagggcgaggttaggggacggtaaaatcctgcacccacttcgcagatgaggacttcacagggcgcaggtcagtaaagggttttaagcaggaaacggcgcaggaaaggaggtgtctgcatggtctgaaggccgaaagaccgcgggcaggaccagcctgtgtgattttaacccaaagcgatgcgacccccagagtctcgcggcaaagtctgaatttacatggaatggagggagccgtgcggggactttaagggctatacgaacccccggacatcgggtacggaggagcaggggactccgaaacgcaggtttaatctagatagagggaaactcacgcggcgactaacagccttcactccaagagatctgcttccgggtttgcaagaaactgcccgcgcagtaggcaaaggggcgggttgcggtggggaaaggccaggcgttgggagggactgagagcatagggtgggcggggccggggcggggcctgaaccctggaggcggaggttgcaatgagccgatatcgcgccattgcactccagcctgggtgacagagtgagacttcgtctctcccaaaaaaaaaaaaaaacaaaacttaggctatctaaaagtttaaccaatggccagtaatataagcaatcatgcatatgtaatgaaggcgccataacaacccaaaaggagaggattcagcggagcttctggataggtgaacactgggaggctcctgcagcgtggtgcacccagggagggcaccaaggctcaacgccccttctcccatgcctcacctcactgatcccttccatctggctgttcttctgtcaactttgtaatatcctttataatacgtaaatctatgtaaagtgtttccctgtattttgtgagccactctagcaaattcgttgaacctgaggagggggtcaagggactcctggatttatatctgatctgtaagcacaagtcacaacctctgcttgagactggcattgaaatgtgtgcactattgtgggactgagccctcaacgtgtgggatctgatgccatgtcccggcaaaatggaacggaatgagagaacacgcacctggtgtctgtggcaggattgcttgcttggtgtgtgtgggaaaacccagtacctctgggctaactgtagcattctgtgttgtgagagaacagtagaagaaactgaatcagtgtttcctatattcttaaatacgaatatgtgaggtttgttgttgtttttttttttttttttttttttttagacaagagtcttgctcttgtcgcccaggctggaatgcaatggcatgatctcggctcactgagccaccgccccagcgtgaaggcatttttgagcaagttatgtctccctaattctgttttattgtacttttccctaagtagttataatagcctctaaatctgtgtggagttttcagttttgtggacaatacaataaatagacaaataaaaacccaaacacaagctgatctctatagaagtgttagatattattttcaacacactaagtgatactccgtatctagataagctaaagcacgaatgatgtcttctgaggtgacaaggtccacagtggctttacagaaacactggccagaagtaaaaactgtgatgataatggcaatagcaatgactgacttttctgaacactatgtgcaaggcattattcggaatactttacctgtattaactcaaataacaacataatagcccatgagaaaaagatcttttcctatcttactaggaaacaactgtgtcggccgggcgctgtggctcacgcctgtaatcccagcactttgggaggccgagctgggcggatcacgaggtcaggaccggatcacgagccgggcggatcacgatggtcaccaggagaccatcctggctaacacggtgaaaccccgtctctaatgataatacaaaaaaattagccgggcgtggtggcgggcgcctgtagtcccagctactctactcgggaggctgaggcaggagaatggcgtgaacccgggaggcggagcttgcagtgagccgagatggcgcccctgcactccagcctgggcgagagcaagactccgtctcaaaaaaaagaaaaagaaagaaactgtcacagatacgctaagaaactggcctaaggtccaagagctagaaatgacagagcaagccccgaacccaggcatctaagaattacagttaggctgagagcagtggctcacacctgtaatcccagcactttgagagcctgaggcaggaggggtgcttgagcccaggagttcaagaccagcctgggcaatatagtgaaaccccatctcaacaaaataaagacaaaacaaaaacaaaaaacccctcaacaattacaattaaacctaaagaatcagttaagtaacagaagtaccatcaaaagtgacaggatgccaggtcagggaaaccattgagaacaaaggcaagcaacataaacgagagtctgcagtaacgcaggcagacactaggtggagaaccagaccacagcttaccatgaaaacacagggactgcagaattgcagactgtcaacaggagctctcctgaagaaaaactggcaaaccttctcaggtaactacaagcaaaagcccagagacgacacattcccagaaaaggcttcagaggtttccagaatctctagtcaggctgaatagagaaggtcctccctgaaggaagccagaaataaaaaagtaggactggttgattagtgaaatgctgaggtgccaagataacaagacattcaaggagaaaaggaaacatgatccacacaaaggaacaaatgaaaccaccacaaactgacactaaagaaatgaagatgtgtgaattatcagacaaagaattgaaaataagagtcacaagatggtcaatgaattaagaggagagcacacatagacaaccacaggaaatcaggaaaacaagatatgagcaaaatgagactatcaatagagagacagaagctataaaggaaaaacagagaaattttagagctgaaaaatgtaatcagaaacgcagaacacagagccttggtgctcaatgctgcacacagattacaacgccctgggccaccgtagttattattgagggtagatcccaacctgaccatgggaataggaatcttgggcaaaagaaagttgaaatggttaaacttatacgttaatacgttaaaatacgttaaaaggtatttttgccagcgaatgggacagaagttgaaatggttcacgttgaaatggttattactgccagcaggtaggacagaagagctgctagtgagactgaagcaactctgggtggggatctggcatctctgggggtgtcggtttggggtagattgaatccaggaaagtttctgcaatttgaattaatttaagcaacttaactaaaaagccctgaaaatgtctgtgaagggtatgcaaactagaatgtgaaatgcaaaactctgcctgggcagaatgtgtaagtaatttcaagtcacctctcaacagaacttaatgcaatcccctccacattctacacccattcaccatggagggagagagtcagccctgtgcacagttgcagagattttcatatggtaaatacctggggtgtggagcgaggagggctaataccggtgatattaactcttgctttagaaaaagcagtaactttttaaaaatagttgagcaacttaagtttgcaacttaggaaaacatcttactttccaacagagatggcccacataactctaagggtttaccttaaaattgagacattaacttaaaataagcagaaagcaaaactgctccgcaggacacgaaatagacttgtgttcccaaacccagaaaatagggacgctctgggtaccaggtggctggaaacgcaggctcccacccgccttccttaggtccctcccggccccgccccctgcctgtccaggccccgccccacccttcgcgttttctccccagcccactccctgtgccggtcacgccccgcctaggccccgcccctaggccacctcagtcccctccggccccgccccctgccggtctctccctggccaggccccgccccttccccgcccccagaccgcccagtctccgctgcgagcggttttctgtagacccggaagcggatcgcggggagtgaaggctgcgccgccgagcctgagtttcgctctctctagattaaatctgcgcttcgcagtcccccttcttccatcccccgggtctggaggggtccctacagatcttaaaatgaccacaccgcgccctccaccccaggtaaattctgacgttgctgtgagaatgcggagatcgctttccctttgggttaaagtcgctctaagcctacttcctgaatctggtctttctgctttgcgctaggtaaacatggcctttcgtgtcttttgctgcctaaaatcctttaccgatttttcttcccgccacgcgggagggcacttttttttttaagacggagtctcgctgtgtcgcccaggctggagcgcagtggcgcgatctcggctcactgcaagctctgcttcccgggttcacgccattttcctgcctcagccttccaagtagctgggactacaggcgcccgccaccacgcccagctaattttgttgtattttttttagtagagacggggtttcacccgtgtttgccaggatggtctccatctcctgacctcgtgatccgcccgcctcggcctcccaaagtgctgagattacaggcgtgagccaccgcgcccggccgggagagcactttttagagccctcacctgcaaggtggattcaggtctatccggttctccaagacctgcccttgtcggcccctggtgcgcagcgctgcagcctcagtccggaggggccgcgtccttacttggttctgggattctgcagaccccacccctgtcctaaggtgccacctttgtctttctcacccgaaatctttctcaggaagggccttcagctcccaagcccctctaggcagtcacctcccatggtgggaaggtgagctgggcttgtcctgtgacactcatggtggaggaggtgacctaggcctgttcggtgacacccagtatgcttttttttttttttttttttgagaatgagtctccccctctgttacccaggctggagtgcagtggcgcaacctcagctcactgcaacctccacctcccgggttcaagcgattttcctgcctcagcctccggagtagctcggattacaggcatgtgccaccacgcccggctaatttttgtattttcagtagagtcggggccaccatgttggccaggctggtctccaacccctgacctcaggttatccgcccgcctgggcctcccaaagggctgggattacaggcatgagccaccgcgcccagccaacatataacacttctgacagcaaatgtgtgggagtttttttcccacacactaggcaattctccagtatacaccagttgcgtgtcctataattcaattcaattctgacactgtgcgcctggagttagagtcagatccaacaggttaaggtcttagtcccacaagaccacccccctgcccccccgccgccacttcagacgtcagtcaaaagtaataggttgtcacctgtccttaaaactgacctatatattggggctcccatgactccctctttgggtttgattaacttgtgaggacagctcacaggactgctggaagcacttacttatgtttactgattttttgtgcagtcatttctcacttcatgttttctacaggttcttggaaaccgggtcatgaatgaaatgatatacagcaggtcctcgaataacgttgttttgttcaatgtcatcattatcattattattattattattattttgagatggagtctagctctgtcaccaggctggagggcagtggtgctgtctccgctcgttgcaacctccacttcccaggttcaagtgattctcctgcctcggcctccttagtagctggcattacaggcatgtgctgccatgcccagctaatttttgtatttgtagtagagacagggtttcaccatgttggccaggatggtctcgatctcctgacctcttgatctgcccaccttggcctcccaaagtgctgagattacagtgtgagccaccgcacttggccattcgatgtcattttttatgtagatgaggaaaaaggttgccatttcacttaaagttccggtttccaagaatctattgataacatcaagtgaggatttggtgtattaatgaaggatatcataaaagatacccatgagcagccagatgaagagatatgtatggtgaggtctgagaatgttctaagcacaggagcttctgtccttgtggatttgggtgcacccaccctcctggcattcagatgtgtttatcaaccagaaagctctccgaagtctatagatcaggaacttttatcgaggcttcatcctgtaggcatgagagattattaactcagtcttcagcatgctccactctttgggaaataagtgatggagctgaaatctccaagcttctaatcatggcttactctttctggcaactggctctatccaggagcccaagacttgcctcattagaacaaaaacactcctatcacgtaggaaattccaagggatttaggagctttgtgcaaggacccggggtcaaagaccaaatatgagaaccaaagattctcctaacacccctttctgtgaggggtttaggatctatatcccaggaaccaggggcagagaccaaaaatatatttcttgttatttcacactccctctgagtggagctcaatcctggtttgacttgagagtactgagtcgttttgcaaataaaactcttgtgcctctttacctgagttttccattcatgtaatggggttggagtccagccttgacagtagtgatgttaccccagctgattctaatctgtccagcattgatactgaggctctgtgtcctccatttctttttttaaaattttttagatggagtctcactctgtcacccagcctggagtgcaatggggcaatctcggctcgctgcaacctctgcctcctgggttcaagcgattctcctgcctcagcctccctagtagctgggactacaggcacgtaccaccatacccggctaatttttgtatttttagtagaaacggggtttcaccatgttggccaggctggtatcgaactcctgacttcaggtaatccgcctatctcggcctcccaaagtgctgggattacagactgtttcctccatttctgaggcctcagctcagcctgggatccatagggatgtgagggcggctgtgctctgcatgaggtttgctcaaggccaggtgtgcaccctgaaggggagctcagtccagcccagctccccaccgctgcagcgtgcgtgtgggcctctctaggaggagagtgggttctgaagaaaggggttacagactcacctgttggtcttcctacaagtttctttttcctacaagtttcttcttcctacaagtttctttttcctcctggtgcagtcggtggcagaggactgtctttgcacgggtgtcttccctgtgtgtgtggtcgtggcacaggaagggggtgtgttaattctaggcattaaataacttctttttcacattccagattaacctttaaagactcatgtggcctgaggaagaagtccagaagagaagaaagaggagacagggatggctctttctcaagtaaagtgatattcttggtggattgttctgtttccccctttttttttttttttggagacagagtcttgcactatcgcctgggctgaagtgcagtggtgtgatcttggctcactgcaacctccacctcctgggttcaagcgagtctcctacctcagcttcccaagtagctgcaattacaggtgcccgccaccatgcccagctaattttttgtatttttagtagagacagggtttcactatgttggccaagctggtctccaactcctgacctcatgattcacccgcctcggcctcccaaactgctgggattacaggcgagagccaccgtgcccagcttgttctgtttctctttcctttctgaaatttcattctttggagttgcaaatcttctttgagtctgaagcatcctgcctgacacgtttgttcgcactcacccgtgccttccctcagtccctctcatttcacttagattccattgcctgtgacccactgatgtgaacttgggacgaggccccactgggcatggtcctgggaagggctcacacccatacatggatggacacggcatgtgagccccgtagtgttaggactgttaggcaagagggattgtttagcggccacatctggatgcactgtgaggtctctgtggaccaggagtagagaagctgcacatggaagtcatgtactaatgcgcacaagtacctggtaattccagaaaaggaggctgatgaggggaattctggcacattgtttgtctgatttaagaatacattcgaagataaatacatgaatctgtatgtttttggctccagaattgttatgatttggaatggaatggaaagttcagaaacaccttagtgaggggagggtgttttattctagcactgatttgttctcttttttgagatggagtttcgctcttgttgcctgggttagagtgcgatggtgtgatctttgctcactgtaacctccgcctcccaggttcaagcgattatcctgcctcagcctcccgagtagctgggattacaggcatgtgtcaccatgcccggctaattttgtatttttaggagagacggggtttctccatgttggtcaggctggtctcaaactcccaaactcaggtgatccatccgcctcgtccttccaaagtgctgggattaccggcgtgagccaccacgcctggctccaccaattttaaaatatgaaatcaatctaaatctctttttttttttttgagacaaagtctcactcttgtcccctaggctggagtgcgatggtgcgatgttggctcactgcaacttccgtctcctgggttcaagtgattctcctgcctgggccccctgagtagctgggattacaggtgcttgccaccacaccgggctaatttttgtatttttagtagagatggggttttaccatgttggccaggctggtcttgaactcctgacctgaggtgatccacctgccttggcctcccaaagtgctgggattacaggtgtgagccaccgcacccggccagaaaacaatctaaatctctaacagaaggagattctttacgtcattttcagcacatccttctcttggaggttgcttttcagcctcttgattctttcttttgatgcagagatgtttgtaagtttgatgtagtcccatttgtatatttttgcttttcttgcctgtgtctttggtgtcatatcttagaaatgactgcaaaattcagtttcgcaaaccttttctcctacactttcttctaggagttttatcatgttaggtcatatgttgaggcttttaattcatttttctttttttttgttgtttgtttttgttttttgttttttttgttacccaggctggagtacagtggtgcgatcttggctcactgcagcctctgcctcccgggttcaagtgattttcctgcctcagcctcccgagtagctgggactacaggtgcccgccatttcaccacgttgcccaggctggtctcgaactcttgacctcaggtgatcctcccgcctcagcctcccaaagtgctgggattacaggcgtgagccactgcgcccagcctaaatatttaaatttaaatggatagaattttatttgtagtttgactataactatttcatagggattggagttaaagttttaaatatttttttcatgtttttaccattcttttattggcattatataacataatgttgacaaactaagttaaatacaacttatacactttactgtccccaagatgctgaaatgcacatgaggaaaaatgataatgaaaaagtcataaaaagtatgtcattgagaggcatgttttctctttgttaatttacattcgtgtatatatgtgtgcatgaatgtatggatgaactatcctatggcgtttatagacgacacatcaccatttcataaatcagttccgtatttttatttttttattttattttatttatttatttttttgagacggagtcttactttgtttcccaggctggagtgcagtggtgcgatctcggctcactgcaacctctacctcctggttcaagtgattctcctgcctcagcctcccgagtacctgagattacaggtgtgcaccaccacgcccagctaattttcgtatttttagtagagacggggtttcaccatgttggccagtatgatatcaatctcttgacctcatgatcaccagccttggcctcccaacgtgctgggattacagacgtgagccaccacgcccggccacactttttagattctgacctttctttctttaaagacaccatggacattgtcatctctgaagacaacacacttcttccagctcctccagatactgaatatcactttgtgtgtcaaacataatatctagcacttctatagagatagctgtgtgttgactatttatttctacgtttcttccattgtctacagaaagagaaatccacacttatttagaagatatcataagctcttacagaagagtataataaaatgcaattagggagacatacctaatgttcttcctaacgtccctaaatgccccaaaataccttagcatggatctgccagaactctcccttcagtaaatcaatacaattctctctttttctcattttatgtaaagatgataactctcccccatgtgcttggtaaaatgtgtttttcagacacggtttgcctgaaaatacctttccatggatttcccagaacgttcatttaaactaaattgacttatacctctctttttgtcattttgtgtgaagataatagctctccccatgacttcttggtgaaatgtgttttttcatatcagggaaggttgacattcagggacgtggccatcgaattctctcaggaggagtggaaatgcctggaccctgctcagagggctttgtacagggacgtgatgttggagaactacaggaacctggtctccctgggtgaggataatgcccctccagaagctgggatctgctctgctgtatctctgcatgttccctgtgtgcctcttgggagcccctgcattgctcaattaagactgaagctatgttaattctcagatgaaaagcttaatagtgcagcatctggacttaattatcccattttcaaatgatctacctccttcaagatatatcattggtggttccagagcttaagtagaaataaaccctatggtagactttaaaaatatctactttgggccagcgtggtggctcacgcctgtaatcccagcactttgggaggccaaggcgggtgggtcacctgaggtcaggagtttgagactagcctggccaacatggtgaaaccccatctctactaaaaatacaaaaaattagccaggcgtggtgccgagcgcttgtaatcccagctacttgggaggccaaggcaggagaatcacttgaacccgggaggcggaggttgcagtaaaccgagatcgcgccactgcactccagcctgggcagcaagagcgaaactccatctcaaaaaaaaaaaaaaaagaaaaagaaaaagtaaaaaaatccactttgctcttttctgcccctttgcttgtgattcagtacttcctagaggacagttcgatgttcgtattttaccatgttccctaaacattcagaaggaggcattcagtgggtgaatttgtgaaatatttttctagatccatttgtaatgtcctctttcctcctctaaacaaagggctgggattctgtaaaagccacagcacattacatgcctttctttttctaagcaggaatctctctttctgaaatgagtattacctccatgttggggcaagggaaagagccctggactgtggagagtgaagtgaaaataacaaaaacatcaagtggttgggaatgcatcaaaggtgtgaacacaggtaagagctcaaatggacagagaggaagctgcaccattagtattcaggtaactccttccgagttgaagagttctgtggaacaaaaagggtttaaatcctgtgagctctcaatggaaacctttctttgccctcatttatccctctgctcttctgacgtgtagtagtttatcctttcacactcccatggcgctacagctccaacagtgacaaaggcaaagtctttatcatgatggacaacaccctgtcatgtggcttctgtgacctctttggtttcttcactctgaggggcacagggagggttgtgtccaagaggtctcctgtgatctctcctgtacctgactgcgtctgatgctcagttctctgtctatacagatcagagctgaggcctccatggacctgcccccttgacctattcaggttttgccccatttcctgtacttgggagacctaatcaggtgacgggaaaacattggcagctcctcctttgcatctggggctccggaaacctcatggtgctgtctccagccctgtctgtctgtcaaagtctttcagcctcagtcatttcttctgttctgcttttgccacagattgcagtgtgcgccacaggggagtacacggggttttctgagattgtttactcaggtctggaatggcactagacagagaggtcctctttttttttttcttcgagacagagtctggctctcttgcccaggctgtgatgcagtggtgagatctcaactcactggaacctctgcctcccaggttcaagtaattctcttccctcagcctcctgagtagctggaactacaggcacatgtcaccacacctggctaatttttgtatttttttaaaaattattatactttaagttttggcatacatgtgcagaacgtgcaggtttgttacataggtatacgtgtgccatggaggtttgctgcacccatcaacccgtcatctatattaggtatttctcctaatgctatccctcccctacctccccatcccctccacaggccctggtatgtgatgttccccctccctgtgtccatgtgttctcattgttcaactcccacttatgagtgagaacatgcagtgtttggttttctgttgtgttagtttgctgagaatgatggtttccagcttcatccatgtccctgcaaaggacatggacttatccttctttatggctgcatagtattccatggtgtatatgtgccatattttcattatccagaaactaatatttctggataatgggcatttgggttggttccaagtctttgctgttgtgaatagtgccacaataaacatacgtgtgcatgtgtctttgtagtagaatgatttataatcctttgggtatatacccagtaatgggattgctgggtcaaatggtatttctagttctacatccttgaggaattgccacactgtcttccacaatggttaaactaatttacactcccaccaacagtgtaaaagcattcctatttctccacatcctctccagcatctgttgtttcctgacattttaatgatcagcattctaactggcatgagatgctttctcattgtggttttgatttgtgtttctctaatgaccagtgatgatgagctttttttcatatgtttcttggccacataaatgtcttcttttgagaagtgtctgttcatatccttcgcatagatgttcatgagggatattggcctgaaattttctttttttgttgtgtgtctgccaggttttggtatcaggatgatgctggcctcattaaaatgaattagggaggattccctctttttctgtttggaatagtttcagaaggaatggtaccagctcctctttgtacctctggtagaattcggctgtgaatctgtctggtcctggactttttttggttggtaggctattaattaccgcctcaatttcagaacttgttattggtctattcagggattcgacttcttcctggtttagtcttgggagggtgtatgtatccaggaatttatccatttcttctggattttctagtttatttgtgtagaggtgtttatagtattctctgatggtagtttgtatttctgtgggattggtggtgatatcccctttataatttttattgcatctatttgattcttctctcttttcttctgtattagtctggctagtggtctatctattttgttgatcttttcagaaaaccagcttctggattcgtctattttttgatggatttttcgtgcctctatctccttcacttctgcgctgatcttagttacttcttgtcttctgctagcttttgaatttatttgctcttgcttctctagttcttttaattgtgatgttagggtgttgattttagatctttcacgctttctcttgtgggcagttagtgctataaatttccctctacacattgcttttaatgtgtcccagagattctggtatgttgtgtctttgttctcattggtttcaaagactgccttcatttcattatttacccagtagtcattcaggagaaggttgttcagtttccatgtagttgtgcagttttgaatgagtttcttaatcctgagttctaatttgattgcactgtggtctgagagacggtttgttatgatttccattcttttgcatttgctgagaagtgttttacttccaattatgtggtcaattttagaataagtgcgatgtggtgctgagaagaatgtatattctgttgatttggggtggagagttctgtagatgtctattaggcctgcttggtccagagttgagttcaagtcctggatatccttgttagttttctgtctcattgatctgtttaatattgacagtggggtgttaaagtctcccactattattgtgtgggagtctaagtctctttgtaggtctccaagaacttgctttatgaatgtgggtgctcctgtattgggtgcatatatatttagtatagttagctcttctggttgcattgatcctttaccatcatgtaatgcccctctttgtctcttttgatctttgttggtttaaagtctgttctatcagagactaggattgcaacccctgctttttttgctttccatttgcttggtagatattcctccatccctttattttgagtatatgtgtgtctttgcatgtgagatgggtctcctgaatacagcacaccgatgggtcttgactctttatccaatttgccagtctgtgtcttttaattggggcatttagcccatttacatttaaggttaatattgttacgtgtgaatttgatcctgtcattatgatgctagctggttattttgctcattagttgatgcagtttcttcatagtgtcgatggtctttacaatatggtatgtttttgcagtggctggtaccagttgttcctttccatgtttagtgcttccttccttataaggcaggcctggtggtgacaaaatatctcagcattagcttgtctgtaaaggatttgatttctccttcacttatgaagcttagtttggctggatatgaaactctgggctgaaaattcttttctttaagaatgttgaatattggcccccaccctcttctggcttgtagagtttctgccaagagatctgctgttagtcttagggcttccctttgtgggtaacctgacctttctctctggctgccattaacattttttccttcatttcaaccttggtgaatctgacgattatgtatcttggggttgctctccttgaggagtatctttgtggtgttgtctgtatttcctgaatttgaatgttggcctgtcttgctaggttggataagttctcctataataatatcctgaagggtattttccaacttggttccattctccccatcactttcaggtacaccaatcaaatgtagatttggtcttttcacacagtcccatatatcttggaggctttgttcatttcttttcactctttcttctctaatcttgtcttctcactttatttcattaagttgatcttcaatctctgatatcctttctgctgcttgatcaattcagttattgatacttatgtatgcctcatggagttctcatgctgcgtttttcagctccatcaggtcatttatgttcttctctaaagtggttattctagttagcaattcatttaaccttttttcaaggttcttttcttccttgcattgggttagaacatgctcctttagctcagaggagtttgttattacccaccttctgaggcctacttctgtcaattcgtcaaactcattctcctagttttgttcccttgctggtgaggagttgtgattctttggaacagaagaggcattctggttctttttgtgctggtttctccccatctttgtggatttatctacctttggtctttgatattggtgaccttcagatggggtctctgagtggatgtccttttagttgatgttgatactattcctgtttgttagttttccttctaacagtcaggcccctctgctccacgtctgctggagtttgctgggggtctactccagaccctgtttgcctgggtatcaccagcagagactgcagaacagcaaagattgctgcctgttccttcctctggaagcttcatcccagaggggcacccgccaggtgccagccagagctctcctgtacgaggtgtctgtcggccccctactgggaggtatctctcagtgaggatacatggggggccaaagacccacttgaggaggcagtctgtcctttatcagagctcaaacgccgtgctgggagatccgctgctgtcttcagagctatcaggcagggacggttaagtctgctgaagctgctcccacagccgcctcttcccccaggtgctctgtcccagggagatgggggttttatctataagtccctgattggggctgctgcctttttttcagagatgcccagcctagagaggaggaatctagagaggcagtctggccgcagtggccttgctgagctgtggtgggctctgcccagttcagactttccggcagctttgtttacattgtgagggtaaaaccgcctactcaagcctcagcaatggcggatgcccctccccccaccaagctcaagtgtcccaggtcgacctcagactgctgtgctggcagtgagaatttcaagtccatggatcttagcttggtgggctccgtgggggtgggaccccccaagccagaccacttggctccctggcttcagccccctttccaggggagtgaacagttccgtcttacgggtgttccaggtgccacgggggtatgaaaaaaaaactcctgcagctagctcggtgtctgcctaaacgtccacccagttttgtgcttgaaacccagggccctggtggcgtaggcactggagggaatctcctggtctgccggttgtgaagactgtgggaaaagcacagtatctgggccagagtgcaccgttcctcatggcacagtccctcacagcttcccttggctagggagggaaatcccccaaccccttgcacttccctggtgaggtgacgccccaccctgctttctcttgcactctgtaggctgcacccactatccaaccaattccagtgagatgaagtgggtacctcagttggaaatgcagaaatcacctgccttctgtgtcgatctcgctgggagccgcaggccagagctgttcctatttggccatcttgccagcaaatccctaatttttgcatttttaatggagatgaggtttcaccatgttggccacctggtctggaactcctaacctcaggtgatctgcctgtcttggcctcccaaagtgctgggattacaggcgtgagccactgcacccggccgatatatttttcaatatgaactactgatttgccaactgtagttaatagaaaacctgttttttaaatatcttgtagatgtctctcctacacatatgatcaaggaattaccaccaaaagagaacaatagcacaggaaaagtattccaagcagtgatgttggaaagacatgaaatccatgacatccaagatttttacttcagagaaatgcagcaaaatattcatgactttgagtgtcagtgtcacaatgatgagagaaattacagagaaatacctgcaattaaaattaaaaacatcactggaagaagagatcaaggtgatggaaggaatgcaggaaataagccagttgaaaatcagcttgaactaagcttttggttgcatctggctgaactgcagggatttcaaattgaaaggaaaatttatgaatgtaatcaaattgagaagtctgtcacccgtgggtcctcagtttcattacttcaaacaaatcttccttgtgtcaacaccagcatttctaatatatacaggaatgattttatgcatccttcattactcacacaagaccagaaagcatacattagggaaaaaccttacaaatgtagtgattgtggcaaggcctttaatcagaggtccaaccttactacacatcagagaatccatactggacagaaaccacataaatgtgacatatgtggcaaaggtttcaggcgaattgcaaacctagcaagtcatcatagaattcatactggagagaaaccttacagatgtaatgagtgtggcaagaccttcaatcagacgttcaaccttactacacatcagagaatccatactggacagaaaccatataaatgtgatagatgtggcaaaggtttcaggcaaattggaaacctagcaagtcatcatagaattcatactggagagaaaccttacagatgtaacgagtgtggcaagacctttaacaggatgttccaccttactagacatcagagaatccatactggacagaaaccatataaatgtgatatatgtggcaaaggtttcaggcaaattgcaaacctagcaagtcatcatagaattcatactggagagaaaccttacaaatgtagtgattgtggcaagacctttaattacaggtcccaccttacaagacatcagagaatccatactggacagaaaccgtataaatgtgatacatgtggcaaagatttcagtcaaaattcataccttgaaaatcatcagagaattcacactagagagaaatcttacagatgtaatgagtgtggcaagacctttaataagatgaccaaccttactacacatcagagaatccatactggacagaaaacatataaatgtgatatatgtggcaaaggtttcaggcaaattggaaacctagcaagtcatcatagaattcatactggagagaaaccttacagatgtaatgagtgtggcaagaccttcaataggatgttccaccttactagacatcagagaatccatactggacagaaaccatataaatgtgatatatgtggcaaaagtttcagtcaaaattcataccttgaaaatcatcagagaattcacactggagagaaaacttacaagttgtaattagtgtggcaaagcctttagcgtgcgctcaaacctaactaaacatcaggtcatccataatggagagagaccttataaatgtaatgagtgggacaaggcttttttttcagagttcaaaattgtaaaacatcacaggattcattctggagagaaacaaaacaaaagtaatgaatgtagtaaggcatttattcaaaattcaagtctggtggaccatcagagaactcacactggagagaaaccttacaagtgtaatgagtgtggtaaaacctttattgggcattcaagcctaactaaccatcaggtaattcatactggagagaaaccttacaaatgtaatgagtgtggaaaggcttatgtgaagtggtcccaccttagacatcatgagagtattcaaactggagagaagccatacaaatgtaccaaatgcagcaaggcctttagacaatgggcggacatcaggattcaccaaaaaatctatgctggagagaaacctcacaagtatgatgagtgtggaaaaacctttacccaggcctctcacctcactatacatcagattatccatactggagagaaaccatatgaatatgacatatatggcaaagtcttcagtcaaaattcacatttcaaaagttatcataggatttgtactgaagagaagccttacaaatgtgtgtggcaaggtcctcagtcaaaattcacaccttgtaaatcatcagagaattcatactggagagaaatcctacagatgtcatgaatgtggcaaagcctttactcaaggctcacgcttcattaatcatcagatagttcatactggagagaactttccaaatgtactgaatgtagcaaggcttttaagaatggccctaaactcaggactcaccaaatagatcatacttgtaaatgcaatgaatgtagcagtgttttaaagtagtgcttgctactcattagataagagtatctaatatatcttggggcaaaggcacacaaatgcaatgtctgtgacaaggattttatctgaggatcaaaagttggggaacagaataattcgtactggggagaaaccttagaaatccaatgagcatgggaaaaactttaccatgagttcaagtactacaagacatcagagagttcatattgaagagaaaccatgtaaatataaggtatgtggcagaggctcttttcaggtttcacagtgcactggacatcagagtatacatcttttgccgggcgcggtggctcacacctgtaatcccagcactttcgggaggctgaggtgggtggatcacctgaggtcaggagtttgaaaccaccctggccaacatggcgaaacgctgtctctattaaaaatacaaaaattagctgggcgtggtggtaggtgcctgtaatcccagctactcaggaggctgaggcacgagaattgcttgaacctgggagatggaggttgcagtgagctgagatcatgccactgcacgccagcctgggcgacagaggaagactccgtctcaaaaaacaaaacaaaacaaaaaaacagagtatacatcttttagagaaatcaaagtaacatgcatgctaaagcttttttttttttttttttgagatggagtcttgcactgtcgcccaggttggagtgcattggcccgatcttggctcaccacaacctccgcctcctggattccagcaattctgcctcagcctcccaagtagctgggactacaggcgcgtgccaccacacccggttaattttttgtattttttagtagatacggggtttcaccatatcggccaggctggtctcgaactcctgacctcgtgatctgcctgcctcagcctcccaaagtgctgggattacaggcttgagctcctgcgcccagcccatgctaagtcttttacccagtggtcaaaactggcacaacacaggatttatactggagagcaacctcacaaatgtaatgaaagtggtaaggctttttatcaaatgtccttgtctttggggtcatgagaaaattcatacagaatctattaaaaatgtactaaacatggaaagacctttaagcaacagtgatgtgatgaaggtggtagttttttaaatgaactcccataagagtctacacaccatagaactcataccaggaatcacaaagtctctaaatttccaaagttaactggaaatattacaaactgcagaataattccaggccaaaatatgttaaattcataacatgatgtatatcaaaggaaaaaaggacatgtggaaatgacacattatcttcagtgtataaaatattcatttatgtgaagtttcttggaaaggctacactactattactggtttccgtctgatgtttgagatctgttgattttatgcttttcttacaggcctttcattatgatctttgggaaggaatcaataaaatgatagggcctacttcattaggtgtggttcattcctattcatgctccctggaagaacaagaatgctgaattttgaaatttaatattgtatgaattagcatcagggagaggtggagaaaaatacaaaactaaaagtcatgcttattgtgttcagtgtgcccttctccagagggccactggcttataggaaaggattgctgctctaccagttgaccaggagatggcacgccaggacattaagacactggagttttgtttcgttttttttttttttttgagatggagtctcgctctcttgacaggcaggagtacagtggtgcgatctcggctcactgcaaactccgcctcccgggttcaagtgattctcctgcctcagcctcccgagtagctgggactacaggcgtgtgccaccacccccagctaacttttgtatttttagtagagacagggtttcaccatgttagccaggatggtctcaatctcttgacctcatgatccgcccgcctccgccttccaaagtgctgggattacaggcgtgagccagtgtgcccggccgacactgggctttttatgagagtgacagattactaggacctcattatgtggtagaagtaatgtaggggaaatggcgattatctttttttaaaagcaatagctgttgtatatcaatgataaatgaaaaattagttattcttgtaaattgaagaaagaatggttatcatagagggtagttcaagtaaaagaaccagggctgggtgtggtggctcacgttctgtaatccctgtactttgggaggccaaggcagatggatctcttgaggccaggagttcgagaccagcctgaccaacatggcaaaaccgtgtctctacaaaaaatacaaaaattagccggacatcgtggtagatgcctgtaatctcagatattcaggagaccgaggggaaaatcacttgaacccgggagacggaggttgcagtgagctgagatcgcaccactgctcgccagcctgggcaacagagtgagactctgcctcaaaaaaaaaccaaaccaaaccaaagaaccagaatagcatgtgcacatatacacagacgtttcacaactggcattatgttttgctactgttttatttacaatgtatcacaagttttatgctttaataaaatttaatcataacttctaatgaatcatgtttcttctgccaccacagttttatctcacctcagttgggtatttcataacagatagtaatagtgcaccattaggctctctaggttgaaggagtcttgcaggggaacatgaggtttgtgctttaactgtggcaactgacatccagtatcctcccctttaatttgttctcatccaaaactaatccatctgtttttctttaataagtgatttttcaagtttgcacttactttttcctttacattacactttaagtaagagtcactgttattagtgctttatgtgtaataacaacctgtgagataagtactgatgttattcacatatcacaaacgaggaaacttagggccaagatgctttaaggactcatccacatccctgtaagtgggtgaatcaggattcacgtttggctgcaaagatgagtgatatagtttggatctgtgtccctgcccagatttcctgtcaaatggtaatccccagtgttggaggtgggacctgatgggaggtgattggatcatgggggcagattcccctgtggtgccgttcttgtgatggtgagttctcatgagatctggttgtgtaaaagtgtgtggcacctccccctctctctcttccttctgctctggtcatgtgaagtgcctgctcccactttgccttccgcaatcattctaagtttcctgaggcctactcaggagctgagcagatgccagcatcatacttcctgtacagcatgcagaactgtggccaattaaacctcttttcttcataaattacccaatatcaggtatttacccaatatcaggtatttcttcatagcagtgcaagaatggaccaatacaatgaatgtgttaaccatggcgatccactaacatggctagttttcttttctttctttttttttttttttttttgagatggagtttcgctcttgttgcccaggctggagtgcaatggtgcgaccttgactcactgcaacttctgcctcctgggttcaagcaattctcctgcctcagcctcctgagcagctgggattacaggtgtgcaccaccaagcccggctaattttgtatttttaatagagatggggtttcaccatgttggtcaggctggtcttgaacttctgacctcagatgatccacccgcctcggcctcccaaagtgctgggattacaggtgtgagccaccatgcccagcatggctagttatttctatctttcatgtacttgacatcttgacttaattttgttagtatcttttgtcatagtggtttatctttacacataattgtgactgtagtaagtattacatctatatttttatttcatgggccaaattactataaatacatacttaaataagatataaatacactgattaccacataatcccagaagaaagattgtccaagatgaaattgcatttattgacccaagaatggttcacaatttatgatggagagagattttcctcaagcaaggaacaagattcaaataccagctgttgaaataattgcacaatattgtgagctaagctatagaatctgaaatgtaagacataaaacattggccaggcgtggtggctcaagcctgtaatcccagcactttgggaggccaaggtgggtggatcacaaggtcaggagatcgagaccatcctggctaacacggtgaaaccccctctctactaaaaatacaaaaaattatctgggtatggtggcacatgcctgtagtcccagctattcacaaggccgaggtgggagaatcacttgaatctgggaggcagagtttgcaataagccaagattgtgccactgcactccaggctgggcaacagagtgagactccatctcaaaaaataaataagtaaaaaaaaaaaaaattttagcgtacagactaaattattgattttagataatataattatttgttcattaatggatggctattaacagcaactttattataattaatgtaataattgaaatatactcaaaagatgtaaaattgtacctggaagatacggaaatgtgttcattaagtaaattgatatagttagatttgtagtgagttcagagttaacactggaatttaaaaaacaggtttgttgagatctaatttatatccataaaattgtttcattttaagtatataattcattgacttttaatacacttgctataagttgtgaaaccatccccacattcaaatcttagaacatttctatcagctgcccccgaaaagatattttttaacaaaaaaaaagaaaaatatcacatgatatatttgaatgtgtaaactgccgaagttatattggtatgaaagccacactggtgacattaacgttttctaaaatgtttcttttgtgaactccggagggaagttactctcactgtagtcaccagacaatagagatgtcctgtttaaatgcaattattgtctccgtttagcacatggtaaggccagcattggagaaaagacgcatattctagccacgttcacccagacacatagtttctgtaataatgagatcactgtattccatttttaacgtcattgtatgcatagaggttttacaataattactctattatcctgaaaataatatcagggactcttgtatggcagctaaatcagagtttaaaaccacagaaaagtttaatctcacattgaatgctacatagataaaatatcaatagtcaccatcagggattggtgtgggggataggacctctagtctgtctccacagactcagtctgtatctcagaaattatttctcctacttttgtatctttgccacaggaatagtttctactccagaggaatctcctttttcagatgtgagcactcacagagacccagcatactcctgtttcccttacatacagactctgcctcacattctaaaatagaaaatactcatctgatttcttcttactgccaggactttgggcttagtatgatgtcctagtgtgtgtagggggagggagccagccagtctctgagttatgagtttgtcatttgagataccatcttttcatagaactacaatggtcaattcaccatgagtgcatgcttgcttctgaaaaacttttcattaccaattatcagaaacaacttcaagttcctaatgaacatcaccaaagagatatttggagtgttatgtagaggccgttctatttccaagatccgtgaagacagactgtggctcttatggaggaagcagaaaatgctgaggtctgaacacctgatggacagtaatgctgaaaatctttgtatttgcctattgggtttgtggatctgcttcagtgaaatgttcttaaatatctttgcctttttctaattcatttttaatagactttttaaacagcagttttaggtttacaacaaaattaagtggaaggtagagatttcccatatacactgtacccccacgcaaggacagcctcccccattattaacaacccaccagagtggtacatttgttacaatcaatgaacctccattgacgtatcattatcacccaaagttcatgtttacattaaggttcacttttgtgttgtatagtctgagtctggacaaatgtatgaagccatgtattcaccatcatggtatcatataaggtacttttactgtcctcaaaatcctctgtgctccacctagattgtcttccttctttcagttctatcacttgtttcacacgttttgcagctctctgtcctatattgtcaattattcccaattaattatcaccctcctatgaaattatacaactctgccctttgatatcaggcatggcccttgacttgaggcaatgcttcaagtcaaggattgaaattccttgcccaatttatgataggcttggctttgtgaattccttggccaatttggtgtgagtagagatgacatgtttcaatttttaaaaatatttttttttaaataagaaactatcaataagttggagaaactgtcaacttatttgttgattgtccgtgtcaattttctctaattaatttataatcatttagactattttcagctccttaaaaaattgtttctcatgggtatgtcctttggttgatataagccaccttcctcaagtaggtcaatgtcattcttgtagcttttttctttattcttaggcttattgcaggaatgatataaaattctttgctcagagaaaataactaaaactcccccaaaggcagttgactcaccagagttctcgaatgacttggaaatcggtaaaatgcagattcccaggctgcatcaagcccagctgaattcatctggacagtgtttttgttttcaacagttttactgagatgcagctgatacatagttatgcaccgcataacaatattttggtcaataaaggactgcatatataatggtggtcccattagaatactgtatttttaccataccatttccatgtttggacatgtttagatacacaaataccatggtgttacaattgcctatgataacatgctgtccccatttgtagcctaggatcaacagtctatatggtgaaaccctgtctctactaaaaatacaaaaattagtcgggcatggtggtgtgtgcctgtagtcccagctgctcaggaggctgaggcaggagaatcgaaccatggaagtggaggttgcagtgagccgagtctattgtaaattattgtaaaaagtctatatggtttagcctaggtgtgtagtaggcgatcccatgtagctttgtgtaagtacaccctatgacgttagcacaatgatgaaatcaacaaatttctcagcacacatcctcatcattaggtgacccatgactgtgctataaaaggctgcacatattgagggtgaggtcagcttggggccccacttgctcagggggcaggctctacccagacagctggcacccctcagctatatgcatccatccttaggcagggaaaactcaagagtcatctctactccctgctgtgcgcaaccctttgagtacctggttctgccaagaaagctacaaaattgtgcggctccagggcagcaactcgtggatcatgctcccgaggcctggtgagagaaacttgcctgttcgaatttaaatggaagctagaagaggcttcatttgcttcttctaaccctctcttttctctgctactaatatggtatgtcctgatagagactgaatcttaccctgaatcccagcatcgcattgtggaactaagtgctgaataataatagttctgaggaagaaataaacgtttgttcttgcaagcctctgagaattcaaagatatttgctaccacattacaacttccagaaagctgaaagtacactttcaatgacctgttttttctttactcaccttaaccttccaaatccacagttacagatagtagctcattatctccactacttgtacgaactttgaaatctgcatttgagaattttcttcatatgattactttcttcctttccgttttatatgttttacttccattagaataaccatttattttaggctgggcgcagtggctcacacctgtaatcccagcgctttggatttgtgctttggcgggcagattacaaggtcaggagtttgagaccagcctggctaacatggtgaaaccctgtctctattaaagatacaaaaaattagctgggcatggtggcacacgcctataatcccagctactccggaggctggggcagaagaatcacttgaacccgggaagcagaggttgcagtgagccaagatggcaccattgcactccaccctgggtgacagtgcgagactccgtctcaaaaaaagaaaaaaaaaccatttatttttaattcatctagaaatatattaccttttattatgtgaccaccctcaatgaactatttgttctctcacttataactttacccaattggtttatcatcatcagatatttgtaaatatcttcaagaaacttgccctctttcaccctgcctccttcaccttactaatcatcagaatcagacatgctcagttactgactatggtccccttacaatcaggaagttcacattgatgacaaaacaaaaacaaaaagaaaaccccaagcaaacaaacaaattaaaaaaaacctctagctctactaaaaatacaaaaaatagccctctccctctccctctccctctttctccctctccctctccccacggtctccctctccctctctttccatggtctccctctgatgccgagctgaagctggacggtactgctgccatctcagctcactgcaacctccctgcctgattctcctgcctcagcctgcccagtgcctgcgattgcaggcgcgcgccgccacgcctgactggttttcgtatttttttggtggagacggggtttcgctgcgttggccgggctggtctccagctcctagccgcgagtgatccgccagcctccgcctcccgaggtgccgggattgcagacggagtctggttcactcagtgctcaatggtgcccaggctggagtgcagtggcgtgatctcggctcgctacaacctccacctcccagccgcctgccttggcctcccaaagtgccgagactgcagcctctgcccggccaccaccccgtctgggaagtgaggagcgtctctgcctggccgcccatcgtctgggacatgacgagcccctctgcctggctgtccagtctggaaagtgaggagcgtctctgcccagccacccatcgtctgagatgtggggagcgcctctgccccgccgccccatctgggatgtgaggagcacctctaaccggccgcgaccccgtctgggaggtgaggagcgtctctgcccggccgccccgtctgagaagtgaggagcccctccgcccggcagccaacctgtctgggaagtgaggagcgtctccgcctggcagccacctcgtccgggaaggaggtgggggggtcagccccccgcctggccagccgccctgtccgggaggtgaggggcgcctctgcccggccgcccctactgggaagtgaggagcccctctgcccggccaccaccccgtctgggaggtgtacccaacagctcattgagaacgggccatgatgacaatggcggttttgtggaatagaaagcggggaaaggtggggaaaagattgagaaatcggatggttaccgtgtctgtgtagaaagaagtagacatgggagacttttcattttgttctgtactgagaaaaattcttatcctgttgatctggaaccttacccccaaccccgtgctctctgaaacatgtgctgtgtccactcagggttaaatggattaagggcggtgcaagatgtgctttgttgaacagatgcttgaaggcagcatgctccttaagagtcatcaccactccctaatctcaggtacccagggacacaaacactgcggaaggccgcagggtcctctgcctaggaaaaccagagacttttgttcacttgtttatctgctgaccttccctccactattgtcctatgaccctgacaaatccccctctgcgaggaacacccaagaatgatcaataaaaaaaataaaaataaaaataaaaaaataaaaaaaaaaacctctaggcttaggggctttgtgttaaatgcgagttacaataaaattgccgacgttcatccaagggtgctgtttcccaatgtgtcatacggcaacagaaaatgtcttccaactggggtgtttagaccacttccttttaaagtgattattatatggttaaactatcttggtattggttttgtttttgcctttgttctttcttctcttttctttcgttgccttgggttttgttttgttttgtttatgtagactggaagtccatattttatttctctagtgacatatttacagttcaatataaattaaaggcctgcttgtatgccaaatccaggtcccttgggtggttcagtcaaaggggtaagacctccagctggctcacaagagaagcgtccactccttggcccaggttttgggattttgccagccttgagctcatcaataatttcttcaatatccttagctgtcaaatcttcatagtaattgtcatttatttgaaccattggtgcgttcacacaggcccctaaacattccacttctacaagagtgaaaagtttgtcaggtgtagtctccccaagctttattccaagctttttctgaatggcctccagtatgctgtcagagtttggaagcatgcagggtgtagtagtgcagacctgaatgtgatacttttcaactggctttcgattatacattgtataaaaagttgctacttcatatactcttattggaggtacttgtaaaacttctgcaaccttgttcatagcagagatgggcaaccacccattctgcctttgggctaaatccaggactggaagaacagctgctgctttatggccttctggatagttttttacaattgcctctatcctcttatagttttctggtgtgaaatcaaatggagtatcagggttattctcaggagtatctctgtgcacaaataaagctcctccagctccattttgcatagctgtcttatgcaattcctcacatgtcttccggtggggctgcagcggcctccctaagagggctaaggccgtagtgtccttgccgccgcctgcaggcccgtgtagagcccagggctctcctgcgcccaaaactaagggagacacggagagcaagagaagggcggcggcagcgccgggctcagcttgagcctccttacccagtgggcggtaaggccagcggcccgggcccggagcgccgcggagaaggcctttgggtttttaagtggctctcttccaattccttttttggctttagtgttaacgataaccaaatttttagcatttgctttaggggggttatactatacagcttatcacagcctaccttccagtgattccatacgacttcatgtaaagcatcagatccttacccatgtatactttcatttcacaactgttggtgtgtgtgctgtcattatcatacatctaacttttagataacctacaagtggctccagggcagcaactcatggatcatgctcccgaggcagattgttattttctaaacagttacattttaaagagatttaaacggaagaaatacgtttaaaaattacccatgtggggccgggtgcgttggctcacgcctgtaatcccagcactttgggaggccgaggcgggcggatcacgtgaggtcaggagttcgagaccagcctgaccaacaaggagaaaccctgtctctactaaaaatacaaaattagccgggcatgctggcgcaggcctgtaatcccagctactcgggaggctgaggcaggagaatcgctggaacccgggaggcggaggttgtggtgagccgagatcgcaccgttccattccagcctgggcagcaaaagcgaaactccgtctcaaaaacaaaaaacgaaaaacaaaaacaaaaacaaaacaaacaaaaaaattacccatgtggttactatttctggcactcctcattcttttgtgtagatcatgtgttacgaaacacaagtcaaatatgaattactgagagaggaggcagggcttggactccagaccagattgaaaactagctgaaacagggaagaggcaaaagcacctctccataagacacgccccccattgccatgtcagtttaccactgccatcgcaacacctggaagtgaccacccctttccaccgcaatgacctggaagtgaccacacccgttctagaaatttctgaataacctgccccttagtttgcatgtaattaaaagtgggcataaatatgactgcagacctgcctctgagctgctactttgagcacactccttttggggtagccgtgccctgcaaggagccgttcatctgctgctgctgttgccgccgctccaataaaagttgctaccccactttgggaggctggggcgggtggatcacctgaggtcaggagtttgagaccagcctgaccaacatggtgaaggcccgcccccatctctactaaatatgcaaaaattagctgggcgtggtggcacaagcctgtgatcccagctactcaagaggctgaagcaggagagtcgcctgaacctggaaggcagaggttgcagtgagctgaggtagcgccattgcactccaggctgggcaacaagagcaaaactccgtctcgggggggggtgggggggaggtgctacccactaccagttcacccttgaattatttcctgagcgaatccccagtctgggggctcacctgccctgcatcatcaccatctgtttttaaataatgtttacttggaacatggccaaacccacgtgtaggtactattgatccattaaaggcagagtagggtatttgcaaccgtatagcctgcaaagaataaaataccacttggccctttaaagtttgtcgatttctcatgtagagtcatattctcttttttcttttgagaccgagtcttgcttttgtcgcccagactggagtgcagtggtgtgatctcggctcactgcaacctccatctcctgggttcaagtgattctcctgcctcagcctcccgagtagctgggattacgggtgctcaccagaacgcccggctaatttttgtatttttagtagacatgggatttcactatgttggccaggctagtctcgaactcctgacctcaggtgatccacccgcctcggcctcccaaagtgctgggattgcaggcgtgagccaccgcgcctggctgagagtcatattttcatcacatatctgaattacaataaagttggggcaataaagcgtacagtcagttttgtaatccagtgtaaggggaacacaaggtttctcctaattggaaaagaataactggtaggtcttttcccttataccagggaaaacataggaaatacgtgattgtgttgctatttgatttgaaactacagtaatggctgggcgcagtggctcaggcctgtaatcctggcactttgggaggccgaggcgggtggatcacctgaggtcaggagttcgagaccagcccaaccaacatggggaaaccccatttctactaaaaatacaaaaaattagccgggcgtggtggtgcatgcctgtaaccacagctactcagagaattgcttgaacctgggaggcggaggttgcggtgagccaaaatcgcaccactgcactccagcatgggcaacaagagcgaaactccatctcaaaaaaaaaaaaaaaaaaaaaaaaaaaaaaaaaaaaaaaaaaaaaaaaaaaagaaagaaagaaactacggtattttatgtgaaaataatttttgatgacattgacagtaaagataaaaactggggcttaaaaactccactaattttacttgacatgcattcataagaggaagtagcaacatacccctaagtggccccaggggtagatggcagaggtgtgtatcctaacaagtctttgcagaactggtatcatcaaatctctcagacagttttgacaaatggtatttactatcttttcattaactcattacctcaccctacccccacgtctccccagcagctgagaggctcctgtaaataaatttgtctgtgcattccacaaataggtcatcatgattctggatccacacttgtatcttaacccctctaggaaaagaattgttacaagaatcaacgtgcaaaaatataaacagtttatataggtgttttgacttttaggtcccccgaaataaaaaaattgtgaaccataagaagtctcaaattttaaatgtctccaacagatatgatcacacacctcaccaagccacgcgctgattgtggatattcctcaatcattataaacatgttcccatcctgacaattttctccatttcctctgcccaattatttttccccatttgtatctatatgacagagtccaattactgattttgctcaaatatcatcttatcctatgggtatttcctgaacagtttaaattaggacatcctgtcactctgtcactacatgtacactttgttgaacttatcctcctattataattattgctgacttacccgtatagaacataagatacttgagagcagggaactggttcagtttcttgctagatcatcaatgattagaataatccctgagagcagggactctgtgcgtttgtattgaatgaatgaatgaacgaatgaacgaatgcatttttttcgatgcaaagaagaaagttactgcaatgcataggctcgtagattagcaggtcataattctacttttattcccacattttgtatctcaggcaacatgaactaaatagatccacctcagcagtggaaaaaggttttcatgaagtttttctaagccatgaaaatggaagattcactctcaaatgctgcattctattcccagtgaaaaataacaatcttatttgtcaggtagaaaaatttttgtaacgacaatctgaaaaacagggactaaaaaacaagtaggaagtttatctttctcacataatagcaagtccggaggctgcagtttgggatgtggcagatcctcttgagaagtccattctgcctactctacctccatcagcactcagccttccttctccttgaggagaatgcagatggctggtgtatgactgagaagggtataggataaggggcaaaaccattttcattttgaggctttgtcttgtttacctgaaaacaatatttccatatttttttcccaaagaatattaattctgttaaatggctactgtaattttaatgaagaacggggattttcaaatttcatattcacacatcaaaaacagaggaagagaaagaaacaattaagttagaaagccaggaacagtggctcatgcctgtaatcccagcactttgggaggctgaggttggaggatcgtttgagcttgagcacaggagttcaagaccagcctgagcaacacagtgagacctcatctctacaaaaaaattaaaaagttagccaggtgtagtggcaacacctgtggtcccaggtactcgggaggctgaggtgggaggatcatttgagcccaggaggttgaggctacaacaagctgtgatcacactactgcactgcagcctgggctggacagagggacaccctttctcaaacaacagcaacaacaaaacccacaaacatgttgcagaccaaatacctgttaccaattatattaatgacaacgtggtcaccataattttgggaagagccagattacattaactgactttgttctttatcctgagagtctaatattatatatagcctatcgcctgtcttttgggtgttcaaaaagaaagacaaaaattattaaacgtccttactgtttttttttaacttacagatttacttctattgagctctatttgtatctaaataaaaatatttctccaagttttaatatattctaattccactatcaaggtaggaaaatgaatttgagatttaaaaaaaaattcatgccctcttaccttaaagtgagagaggtaaacacttccaaatgtattttcatattagactataaccgaaaggtaatctgttatatcataacttggggattttcagagggagcctatatttccaatgaagcattaaagaccttcacaggatttccttgcatatatagaatatactcaattgagggtgaacatttaaaatgtttaaggctatatttgttccaaaaaatgaataatcccatcttgttttagttttcaatttgtttagtttccctttttattcgttgcttttccacatgtaaaatatttttgtctctaaagtcaaaattatattacaaatatatgaaaatccctattctgttttgccttctcaaactttttattttcttaaataggtttcttgataggtattaatttcagattttttttatcacaaagagaataccatatatgatattctataccttgttttttaggtatggtggtgatcactccaatatgactttcctcattctttttttttctttttttttttttgagatggagtctcactccgttgcccaggctggagtgcagtggcgcgatctcggctcatgcaacctctgcctcccgggttcaagcgattctcctgcctcagccaccagagtagctgggattacaggcatgcgccaccatgcccagctaatttttctatttttagtagagacgggatttcaccatgttggtcaggttggtctcgaactcctgaccttgttgtgatctgcccacctccgcctcccaaagtgctgggattacaggcatgagccaccgcgcccagccctgactttcctcattcttttaacagcttcacatacatagccaacattcccctaatttctcagccaccttgcctcaagttaaaaccatgagaccggttttgccaaacagggtgtaagtgtaatgtatcactttcaggccaaaccacttaaaactaagtgtgaccttcttgcttgtttcctttgcaataatcagaggcccatttttgagatagagaaaccataatatggaagcccctccatctctgagttaccacataagcatcagttgccctacagggtcaactatcccagtggtgcaattgacagaaaagactcattttatacagtaagcttccaggatttaacaaaaaaggttttgtatctccgggcaccacaggacatgccattccttacaagacttttaaaagcaaagcctagacagctttagcaataccctctttcttgacaaactgttagagatctaggcctgaagggcaaggaaaggacaataaagtctgtctttctacatcatttgcttctcagtgatgctcatcaaattgctatcaatcactgtgtcatgtttccactgccaatttttttagatattcacaatacagcccccaaaccccaacctatcctgtgtcttagtccattttttgttgctgtaacagaaaacctgacctgggtaatttatatgtatgtatataatttatgtatgtgtatatatataatttatttcttccagctctggaggctgggaagtccaaggctgagcggctacatgtggtgagggccttcttgctgcatcataacagaagtcatcacatggtgagaaggaggaagcatgccagctcagctctcttttcctcttcttataaggctactaatcccaacatagggagccacccccataacttcatctatccctaattacctcccaaaggctcccacctctaaataccatcaacatatggatttgaggattcaatttccaacatgaacttttggggaatacatttgaacatggcacccagtcaccatttcctaaaagaataatactgcaggtacccaaaacaactgaacaaagacattaggcaccatttgcattccctctcaaagtttctaaaaccatctccagttttgaggtcaatatgtctcagctacttttctatactgcaatgtcctttgtccacttaacagtaccaccactgcaatctggtgctcagaactgttttccagaaggcgtttcctgtatggttcttgctaaactttgccaatgagaaaaacctgaatgggccaggcgcagtggctcacaactgtaatcccagcactatgggaggctgaagtgggtggactgcttgaggtcaggagttcaaaaccagactgggcaacatggcgaaaacctgtctctaccaaaaatacaaaaattagcccgtctcttaacccggtctcaaaataaatagataataaattaaaaataaaaaaaaatttaaaatgctgttaaaaaaaaaaaaaaaggaaaacctgaatggaataggaaaggcagaagtgaagcactaagccattaatctcagatgaatactgcacagacctcaccatctctaatcccaatcaagcagccagaagcagtaacttctaagacatctccatgagctctggtttctcactgaagctgccagtgactatttttctttgatattcctgctggagtcttccacacctttcactgctcaagcacctccaaaattctttttattttatttttttttttttgagacggagtctcgctctgtggcccaggctggagtgcagtggcacgatctcagctcactgcaagctccgcctcctgggttcacgccattctcctgcctcggcctcctgagtagctgggactgcaggccccccactaccacgccccgataattttttgtatttttagtagagacggggtttcatcgtgttagccaggatggtctcgatctcctgacctcgtgatccgcccacctcagcctcccaaagtgctgggattacaggtgtgagccaccgcgcccagcaaaaattcttaacatataactattcttattcttgaagtaattgtatacgttttcctaaacacagactaatacaatcattcagaataaagctaattccatgttttcaaagtttattcatcacaatctgtattactgtattggtcctgagtctcactctgtcactcaggctgagtgcagtgtcagtcatggctcactgcagcctcaacctccctgtctcaagcaatcctttcacctcaacctcccgagtagctgggactacaggtgcatgccatgacacccagctaattttttattttttgtagagatgtggtctcactatgttgcccaggctagcctcgaactcctggacacaggtggtcctctctcctgagcctctcaaagtgctgagactacaggtatgagccatagaacattgccaactttgccgaaatccagaatgctatcaagaaagtggaaaaacagtacacagaagtggaaaaagtactggcaaatctcataagggtgtagtattcagaatataaaataactcataactgaaccaaaaatacacaatctaatttttaaaacattaaaagaaatgtctgagtagacatttctccaatgaagatgcacatggctaataagcataggaacagatgctcaacattcatcattaaggaaatccaaccacaatgaaatatcacttgtaagtgactagaaggctatatactactactactgtgaacccaacaactacaaacatcaataatcgataggaagtgcagaaaatggaacactggaacatcgctggtagaaaagtaaaatggtgcagctgccttcgaaaacagtttggtgaatccacaaaaagataatcactgataattactatatgacccagaaattccacgtttacagacatacccaagagaagtgaaaacatgtatgtgcaaaaacatcttgtaaaaagttgttcatagcagcattttccataatagcctaatttcttttttttttgagacagagtctcgctctgtcgcccaggctggagtgcagtggcgtgatctgggctcactgcacgctccgcctcccggattcatgccattctcctgcctcagccttccgagtagctgagactacagatgcccgccaccaggccagctaattttttgtatttttagtagagacggggttttgccatgttagccaggatggccttgatctcctgacctcgtgatccgcccatctcggtctcccaaagtgctgggattacaggcatcagccactgcacctggcccataatagcctaatttcaaacagtagaaagagttcaaatctccatcaaataatgaatggacagacaaactgtagaatattattcagcaacaaaaagtgatgaggtattaggctgggtatggtggctcacacctgtaatcccagcactttgggaggcctaggcaggcagatcacttgaggtcaggagttcgagatcagcctggccaatatggtgaaaccttgtgtctattaaaaatacaaaaattagctgggcatggtggtgcatgcctgtagtcccagctactcgagaggctgaggcaggagaaccgcttgagcctgggaggtggaggttgcagtgagctgagattgtgccactgcactccagactaggcaccagagttagactctgtctcaaaaaaaaaaaaaaaaaaagttatgaggtactaacaaatgttaattttgggtgggtggtattttttatagtgacagtttgcccaggctagtctcgaattcctgggcttaagcgatccgcccatcttggccttccaaagtgttagaattacagacatgagccactgtgcctggcctagaaattgattttttttttggacagggccttgctctgtcacctaggctggagtgcagtggcataatcctagttcactgtaacctccaactcctgagctcaaggaattctcctgcttcagcctcctgagtagctggcactatagaaatgtgccaccatgcccaactaacttctaaatttgcagacagggtcttgacatattgcctatgctagtctcaaactcctgggctcaggcaatctcctcgcctgggcctctcaaagtgctgacattacagatgtcagcctccctgcccagccggctagctgaaaatttaaaccacagatgagtattcactccagccccaccagataaacatcataacaccccaagtcaatcatctttcactgccttctctagccattttttaaccagcttgggaagtctaccctgttctctccagaaagccttttgtaataaacattcttataatactttgatgtagagtaccaccaatcctgaaatctaaaccaaactttgcacggggttccctcctgttccagtggagtggcgacaagtgcaaatcagtaaaaaaaaatgttttgggggtaaatacatgaggtttctagtttctttaaaaaaaaaatccattgcttatgttcattattaaggggaaactcatgaacactgatttttttcaaattatttcacggagtgctccaagtacaaaaaaagaagttgtgttattatttcagaaatttcatttactaataattttcatatgcttacatttgttattttcctctcatgtaaaaggcatgcagaaataaagttatgtagaaaaaaaggcatgtagaaatataactgcacagtgcatattcatgaacaggaagacaggtttcagggggtctgatattgtcccactatggcatggcattttcattatagccatagaagtcatctagggcagagtgtggagaaaatatttcaagtgcaaattatgaatatatacttcttaaattgtatactgtttgaacataacatggatagaaattgttatagatgacattcaaccttgagagtctaatgatgtattatagtgtttgatattaagtgtcccaatgaggtgggatatgcttgggttgacggaaggcacacgattcattcagggttactaaaaatgattatattttactaattaagacataagaagtataatatattctaaataaaatggtatcaaatgcaatctcaggggccaaatgtgaatcccctataagaacactactctggttcttttgatggaactgtcctctatggtaaccattctctcttcagtttccaaaaataagacctatctatgttcaataatctgtgatatgcaacagtaactacctttcaagagagggtgactatcattccccctccatttctttctaccacatatgcagtctctagtaaccgaccatttcacttccatgaaaatctctcaatgtcccaccctactcttcttgtttcatggtcatcttgtactgtaaccaatctctcctataatcgacaaaggtccccagtcacatcaacaattctaaggggtcctgaccacataaagcatatatgttagacaatagttttacctctcttctggcacaaacccccatgctcttatagtatattgtatattagtgttcttggctgggcacggtggctcatgcctgtaatcccagcactttgggaggccaaggcaggtggatcacctgaggtcaggagttcaagatcagcctggccaacatggcgaaactctgtctctactaaaaatacaaaaacaaaaaaacaaaaaactagccaggcatgatggcgcatgcctgtaatcccagctactcgtgaggctgaggcaggagaattgcttgaacccgggagacagaggttgcagtgagctgagatggtgccactgcactccagcctgggtgacagagcaagactctgtctccaaaaaaagaaaaaattagtgttcttgctttttccaggtttcagtaatataaagaagccacacctaaggaagtagtcccttccatcttacatccattccttgagacaatcatgataaatgaaaagcatgccatgaagatttaacagcaacagatttcatacttttaaaaatatgaaataactgaataaaaaatttttaacactgaagttacatctttccacagatgtccttgctcctctgacacacaccatgagtttgtgactttttaaaattgtctgtgaatttaacatcaatcacttaatcttcaagaaggaaaaaagacttagttccctctagcctgaatttttgtatgacaaaatgcttgcatataaggatgaatttccattgagaaatttaaaataatttaccaccttcacttgtaatgcttctctccaatatgaatggtgtatcctgaagtcagaacattgcttaaaggacttgccacatttgtatggtttccatcctgaatgtcttctgttataaccataatagggtaaatatttttataaagctgttcacattcattatatttgtaaggcttctctacagtaagaattctatgatgttccacaaggcttgaactttggataagccttgccatacatgttatctttgtgtggtttatctcaaagatgtatattctggtatcaagtgagacataagccatagctaaaggctttaccacattttcgttttatatggtttcttttcacaatggagcccctgatgctaggtacagcttgaatacttaatttttgtctcattatatttgatatgtttttctctattataacttttttgatgatctccaaggtttgaactttggaataaagcattaccatgtatattatgtttacaatgtttcttttcaatgtgtattttctggtgtctagtgaggtttgcaaattgggtaaaagctttgccacattcagtacatttgtaaggtttctctccagtatggattttcttatgctgagtaagatttgaacgttcagtaaaggctttgccacattcagtacatttgtaaggtttctctccagtatgagttctctgatgaccccaaaggtgtgaacgtttgataaaagctttatcacatttattacatttgtaaggtttttctccagtgtgaattctctgatgttccacaagacttgaactttggataaaagccctgccacacacattacatttgtgtggtttctctccaggatgtatattctgatgcctagtgagatgtgagcactgcttaaaagctttgccacactcattacatatgtaaggcttctctccagtatggattctcttatgttgggtaaggcttgaacgttcagcaaaggctttgtcacattcattacatttgtaaggtttctctccagtatgaattctttcatgaccccaaaggtgtgaacgctggataaatgccttaccacattcattacatttgtaaggtttctctccagtatgcatcctctgatgacttgcaagatttgaattttgactacagaccttgccacatatattacattgatatggtttctctcctgtatggactctctgatgcctagtgaggttcgaacactggttaaaggctttgccacactcgttacatttgtaaggtctctgtccagagtgaattctctgatgattagtgaggttcgaacttttgctaaaagcctttccacagtcattacacttgtatgatttttctctaatgtgtgttctcccatactgtgtatgtaataaagggtatttcaaaatcttcctatatttattacaaatgtttttgacacaaggaggaagtggtgaaactgaggaactattgatagacttctcaactggattacattcatacattttctccccagtttgaaatctctgtagttcagccagctgtgcctgtaagcttaatccaattttattttcaaaacacttcacgtatttgtttccggcataccttatgttatttttcagttttaacaaattccttataaatggcttgtcatggatgaaatactggtgtgcactatctcttatagaaacactctgctttaaagagaaatgtattgaggatttattatgttgttgatcttttctgtgagtgagatttttgttacaggtcaaaggcattcctttgtaattttttacatcatagtcccacaggctgtcaaacttaggcatattttcccagacttccttgaggtcaaaattgttgatgccatggctttcctttctttctaatatcaccagatggtataattcctctttattattttcctttggtgataatcccttgcttgtaaatccaacagaaatatctgaaagatattaaaaaaaccacaggctttccatcaaatagagttgcaaggtaaatattttattaaaatacatattacaagaaagctaagatttacaatgaacagagttatgaagcttctcaactgtctttaaacgtttaacaacacaaagggactagctgtcctcaataaagtaacacagtaacaaaacatgtaacaaattattttaagcacagtttaaaacaccctatagctaaaacactcatactatgtaaatccacataaactctgaaagaagaggtatttttccaccaccactccaaggaacacgtaaattggcatagctatatggtagtctcatatttgaagataaacaaatagtaatgcattatttagtacataattattacacacaaaaggtaaggcacagctcaagcttatctaataaaaaatatttaaaaatgacaattcataattgcaaacaaaacactgaaagaaaaaattcggaagaatttaataaaattttgaatatttacaaattgcaaatgtgagtacttgttataaaactacttacacccatgtagaatgtgcattttgcagcattaacaatttgtgcatggtggttctattgcataatatatactgaaaaaccatcatctgtaaatcattacaaaaataaataaaacactttagtaacctgtgaaaatctaacaggcaagttaatgaacaaccacaattacacaaaattgtcagtgaaattctaaagaattactgcttatgaactacagaaaaaacagaagggacacacaataggaaaaataatatgttgagaatcactaaattttgaaatatcagcttcaggtaaatgcacattactataaagatgaagaattaggaggggagtctgaaataatttcatgcctgcagttatatgacagcagtatatagagaaactccctgactaggaaatgtcatctagttttccagttctatggccaaaaaatacatataatgaaagctgtgtgctttaacattttattatgtagagtcagagaaatgttgatatgaaaaaaaaaattacaaaaaagaaaatatgtaagatataatgaaggcaaaggtcaatctcataagaaacatgacagacacttgacatatcttattcataaaggtaacttttcaaagcatactaaatgctatgcaagttactaaggtctctaacagcactaattgatgtaaatcctcttgaggtaaattatcgcaccttttcataccaaaacaaagggctgaagaggtttacatatctatccctaactcacagagaaagcacatctgaaagccagaatctgaacctgtgtgtgcgggctaagatgccatgttcacagcattaagcaccactggccacccagggcagcacggattataaatcacagcaaatacgaggagtgtaggaagaaatgtttcaaggcagattatgggacctgagctgtgtcacctatagtgtgacagcaccactgctctcagatagcatttaagtcaccttatcttgcacaagttgtttagacagtgaccagatcatgttgctgtcctgagtaagctgtcctgtgtataagcaggagtcattctttacacagtgtgtgcaatgaagggatgttattctgtgctaaaaagaaatgagctgtcaagctataaaaagacatggaagaaatttattttatttatctattttttgagatggagtctcgctctgttgcccaggctggagtgcagtggcatggtctcggctcatcacaacctctgcctcccaggttcacgccattctcctgcctcagcctcctgagtagctggaactacaggtgcccgccaccacgcccggcttattttctgtatttttagtagagacggggtttcaccatgttagccaggatcgtcttgatctcctgacctcgtgatccgccggcctcggcctcccaaagtgctgggattacaggcgtgagccaccacgcccagccctagaaattgaaatgcatattattaagtgaaagaagccaatctgaaaaggccatatactatatggttccaactatatgacattctgaaaaaggcaaatctatggagacagtaaagagatcagtggttgccaggtgctggggggagggagagatgaacagacagagcacagattttttagggcagtgtaattattctgtaagatactattatggaggatatatgtctattatatatttgcccaaacccaaagcatatacatagagtgaaccccaacatcgactatggactttgggtgataatgatgtgtcaatgtaggtttatcaattttaacaaatgtaccactgtgatgggggatggtgataatgggggaagacgctgtgcacgtgtgggggaacagagtatacaggaaatctagtttgctgtgaacataaaattgctaaaaaatagaaagtctatttttaaaaagtataagctaagagttgatataaagttacaggaaacagaagtaaaaggaataactaatactatcctttaacaaagttttggaggttatatatgttttgaggaaactaatactcagacataaatactcaaggaagaaatcttctggtaaaacatataaaacatcatgaaagtatatgaagcagaaaaaaatatatataataaaacaatattcattcatctcatggccccacacactgtagatataaaacaaaaaacactaagagtatcatgaaaacatgtaactgctgattaaatacatacaagttcatttataccaatgacattggcaaaatgaaagtgtcagtggcttaaccaaattatactgaactttaaaaatgtatgcctaattcaactttgtaagctccctcaataaaggcataaaaatcatactgaagaaaaatgtacaactgcacgtatgggatgaataatgtggtatgagcaacagtttggtcaacatgttcgcagatatgaggttgagaacttggagaatgctcttcccaggagaaactcctacaccttgtactgctggctccaagaggatgatcagcatatatctaaccagcgttgtcacactgcccttgggagacactggaaactccacagaaaccagaaggtcagaagcacttatccctccggctgtcctgattctctctcagcatactgggacatgcaggctactctactcagtggcttcaagaggcacctctatgtagcagaatgatactgtgacagattaattaatgttctctttcaagaatgttctgtcaccaaggaaacctcttccatgggagagtccaccaaaagttgtccatcgcctattggtgggttatcacagcagaaagagaggaaatttcagactctaggaatgtgtacttttctttttctttttttttttttcgagatggagttttgctcttgttgcccaggctggagtgcaatggcgtgatctcggctcaccacaacctctgcctctcgggttcaagcaactctcctgcctcagcctcccgagcagctggtattacaggcatgcgccaacacacccggctaatttttgtatttttagtagagacggggtttttccatgttagtcaggctggtctcgaactcccgacctcaggtgatctgcccacctcggcctcccaaagtgctgggattataggcgtgaggcaccacgcccatccggaatgtgtatttcaaaagcaactttcagaggcaaatcttagaagaatatggaatcaggaagactaaggtctccctaagttcccggatagagtagaaagctagaaaagggagagaaataaaaggtacgggagtaaaataaaagggtcggattttgtaggattctaaggaagaggcagtgtgctctgtccacaggctgcaaggtgagaacctaaaagaatgagatatattcccattttggaatggcaatcaaaaagaggatctctctgtcaagtctttacattaatgctgagtaacaatctcaaaagcctgcccattcccctttagacacatgtggcaaaagcagaactgaaggaatggccaaggggcttgaacaagtagagagaccgacagtctttcaaatttcagggaaccccagatacattttgggggagccactgttttcccattttcctgaaaagttcttgcaggtataagaaataggaatagaaattgaataggttctggagccagggctacaaaggccccagctctgatctgtatagactgaaaaccacacatcagatgaaattatatacactaaaagagagtccttaaaaacagccatttcggtccctctcaaaaccaagagaccaaaatggtcagaggggccaaacagtattgtaggtcatgatagcacctttgcttttgtgtctgtatgagttggggcatcacgggagagtgggagttcaaccttttacacatttgaataacagtatgttgggggacagtaggagcgggtgtggaccttgctttgagagctcataagaaataaacttttgttttcccactgatctttcccatttgcagagtttcccaaacaatactcaatggagtagcttactctgtggccatctgagcgcttatttgtgctcacattccgacctacctgattttttccctattttcacttcactttccatagtctaggactctttcctgtgctccaaaatgaacacaatattcagctcaggaaagatttcaacttataaagaaaaaaaggaacatggtatgctgtgcttttcctggatacattcccagccctttgttcagctacgaagagaggacattacacatgggtctgcaaaactatttcccaaaacaatttcataaattagtcaacggactgccttcttctgaatgcttagggattattttaaatatgcagactctgaaaaaactactgaatcaaaggcacagggataaaaccatgataccagacactttaaaacgttttccataaggttttgtaagtactgatattctggaaccaccactcgtcaaacctgattatgcgcagaacttctgaagaaaggggaagtttaaagtctatatgctacattatgaagcctttccactctcaatcaaaaagtttcaatctccccttttagaacagggatcggattcagacaagcacatcagggcctcccaagagactcacaaggaaaaatgtaaagatgtacaagggtggttaccatcttctggagggatgttatcctcatcgagagaaagcaggttcctgtagttctccaacatcacgtccctgtacaaggccctctgggcagggtccaggcactcccactcctcttgagagaattctatggccacatccttgaatgtaaacagtccctgaaataaaaacacacttcaccaagtggacacaggaaaatttcttattttcacacaaaatggcagaaaagaggtgtacatattcactgatttatgtgagttaatgcaagcaacttatatatccctaattttattttttttaaactgagatgaaattacataacataaaattagctatttgaggctgggtgcagtggctcacacctgtaatttcagcaccttgagaggctgaggtgggaggactgcttgagctcaggagtttgaaacagtctggacaacgaagtgagactccacctctactaaaaaatttaaaaaattagctgggcacactggaatgggcctgtagtcccagctactcagaaggctgaggtgggaggatcacttgcacctgggaggtggagactgcagtgggcagtgatcatgtcactgcaccccagtcagggagacagagcaagacttcacctcaaaataaaacaaataaattagccattttaaagtacaattcagtggcatttagtacattcacaaagttatacaccaccacctctgtctagttcaaaaacatttttatcaactccaaaagaaatgccgtacccattaagcagtcactccccatgtgactttaacatgaaataagcttacccaaataggtaagtgacttgcatgctgcaaactatgaaatactaatgaaggaaattaaagcagacaaaacaaataaatggaaagatatcctatgttcaagaacttagaaaattaatactatgaaaatgtccatattatccaaagcaatctacagtcaatgcaatccctatcaaaatcacagtgacactttttacaaaaatataagaaataatcctaaaattcatatagaactataaagacccaaaagagccacagcaattttgagcaagaatatcaaagctggagtatcacacttcctgatttcaaagtatattacaaaggtatggtaatcaaaacagtatggtactggcataaaatagacacacaaaacaaaagtactagaatacaaagcccagaaataaactcacacatatacaatcaactgatatttgacaagtgtgtcaagaatacataatggagaaaagatgctgtcttcagtaaatagtgctgggaaatctgtacacccaaatgcaaaagaatgaaactggatgcttatcttatgccacaaataaaaataaactcaaaactgactaaagactcaaggtaaatttactcaatttaccttgcgtctttagttttacctgaaattgtaaaactcctagaagaaaacatagggaaaatgttcttgacattatcttggcaatgatttcttggatataacaccaaaagcacaggcaagaaaaggaaaaatagaccagtgggactacatcaaaccaaaacacttgtgcataccaaaagaaacaaccaacagaacaaaaaggcaacttatggaatgggaaaatatttgcaaactatatatctgaaaaggggttaatatccaaaaaatataagtaactcctacaactcaagagccaaaaaaactaattacccaataaaaaatgggcaaaagagctgaacagacattttttccaaagagaatataaaaatggccattaggtacatgaaaaggtgctcaatatcactaatcaccaggaaaacgcaaatcaacaacataatatgatctcacatctattaggatgaccactaaagaaaaaaaaggacaagcaatgtctaggatgtggagaaaagggaactgttgtacaatgttggtcagaatatgaattagtgcagccactatggaaacagtacggaggttcctcaaaaattaaaaataggccgggcgcagtggctcacacctgtaatcccagcactttgggaggccgaggtgggcagatcatgagatcagaagttcaagaccagcctggccaacatggtgaaacctcatctctattaaaaacataaaaattagccagacgtggtggtgggcgcctgtaatcccagctactcaggaggctgagacaggggaattgtttgaaccggggaggcagcagttgcagtgagccaagattgtgccactgcattccagcctgggcaacagaggaagactccatctcaggaaaaaataaaaataaaatgaccggctgggtgcagtggctcacgcctgtaatcccagcacttcagaaggccaaggcggatggatcacacggtcaggagattgagaccatcctggctaacatggtgaaaccccgtctctactaaaaacacaaaaaattagccaggcatggtggcgggcgcctgtagtcctagctacttgggaggctgaggcaggagaatggcgggaacccaggaggcggagcttgcagtgagccaagatcgcgccactgcactccagcctgggtgacagagcgagactccgtcccaaaaaaaaagcgaccatgatctagtaattccacttctgggtatatatccaaaagaattaaaatcaggatcttgaagagagataggtacttccatatctattgcagctttattcttaatagccaagtcatggctaaatatccatcaaggaatgactgaataaagaaaatgtacacacacacacacacacacacacacacacacacacacacacactcacacacacgaatattattcagcctttaaaaagaaggaaatcctatttgctatagactacctgaatgaaaatggagtatgttatgtaagtgaaataggccacacagagaacaaatacatgactccacttatatgaggaactgaaaacagtaaaactcatagaaacagagaatagaatggtggttgctaggtgctgagtggggaaatggtgaggtagtaatcagtttcagttacacaagatgaaaaagtcttagagatctcctgaataacacagtgcttatagttaatcctgtattgtatacttaaaaatttgttaagacagtagttcttaggttgtattcttataaaaatatgaaataataaagacagcaagaaaaaaactttctgaggcaatggatatgtttatgacagattgtagtggtggtgtcagaggtatatactgatctccaaactcatcaaattgtatacattacatatgtataggtttttatgtcaatcatacctcaataaggaagttaaaattcatttaaaactgaatttttcagttttccttttattgatttccagtttcactcgattgtggtgtgagaatagttttataagttgtagctttttaaaatgtattgagacttgttctgtggcctgacatgtggtccatcctggagaatatgctatgtgcactagacaagagtgcagattccgtttttgctgggtgcagttttctttccgtgcttgtttggtgtagtttacagcagcagtgtccaaccttttggcttccctgggccacactggaagaggaagaattgttttgggccacacataaaatacactaacactaatgacagctgatgaccttaaaaaaaaaaaaatcacaaaaaaatctcatgttttaagaaagtttaaaaatttgtgttgtgtcacattcaaagccatcctgagccacatgcagtctgtggtccgtgggttagataatcttggtttaaagtgttgctcaagccctttatttccttactaatcttctgtctggctgttctatccattattaaacagagagcatagaattctccaactattatagcaggactgtatctccttgtaatttttgttccaaaatatttggggtgttgatatttgatccatattttttatagcagttacatgttcttgatggattaaccccaatatttactgtccttcaacatctctggtatcaatttttgacttaaagtttatttggtctgctatctatgtagctatccagctaggtttaatatttgcatgaaatacctttttacatccttttattatactttccaggctatttgtgtttagctctaaaggaagtcttttataaacattatatagtgaaatcatagttttaaaaaattattcctccaataagtgccttttaaaggagaatttaatccacttatatttaaagtaactactgataaaagaaccacttttaccattttgctacttgtttttcacatgcctatcttttttgttttgtaattattcccttacttgcttctttgtgtgtataagtttgtgtgtgtatatcatttcggttcccttctttacatttttgttattttcttaacggttgccctgggaattaaaatttccatcagaagctgataataattaagtttcaatcgatgctaagttggcttcaattgcataacaacttctgtttctatatagctctggctggttctctttataatgtcaaaaattacttctctatgcattttatagccagtaacagatttacaattactgttttatacatttttaaatcatatagaaaaaaagtttttaaaaaaccagtaatattggcttttgtatttgtacctacgtaggtgttttacctgtattaatttgtttttatggctttaaggtactgctggtgtccttttacttcagcctaaaagactttgcttaacatttcatgcagggtaagtccactaatgcaaactccctcagctcttgtttatctggggatctcaatttcactgtcaattctgaaggataatttgcctgatactgaattcctgctggatagttctttcgtttcaaactttgaatatgtcattccactaatgtctagcctccatagtttctgatgagaatttggctcttaatctttttgagggtcactgtacatgacaaattatttctatgttgctactatcatgattctcttttccttccacagtttgattatgtgtcttgctgtggatctctataagtttatcacaattaaagttcactgagtttcctaggtatacagattcatgttctttatatatttgggaggtttcagttcttatttcttcaaatattctttctgccttttgctttctccttttcttggaaaattcttattaagcatacatacatatgcttcatggtgtcccaaagctttcttatattgtatttttcttccctttcttctgctcagattaaataatttcaattaacctaaagtttaggttagctgattctgtattctgtcactctactcttgaaactttatagttgaaattttcacgttatacttttcagctccaaaacttctatttcacttctttttaataatttctatgtttttactgatattcgttgaaacactgttgtcctactttcctttagttctttgtccaccgtttacttcagctctctaagcatggttaagatagttgatttaaagtattttttagtaagtgtaatgtctgagcttcctcagaagcatcattaagccagtaatcatgcttcaaattgcccaacctggaggaatcctcacacagctgtagtacagttggcctgctcagaggcagccaatgcggattctttgtaatggagaaaaactgtaaacaaccaatgtgtcttcagtaagagaatgctccaatgagaaagtaaaaactcaagctgtctctgtttaccagcaaaaaaccaaaacaaagacatacagtatacaaatatacaattttgcaaaacagaatatcacaacaaaatattcactaaacattttctaaaattaaattatgatttttacgacttctcttccattgaaaagaatgatcagtagttcctgatggagatagtgggtgatggtggactggacaacataatgttttactttttagtccctaagcatcactgcatgacattttatcataaaaaatatatatatcatgtgatgtttactacaaaagaaatgtagtatttaacaagtagtgtaatcagaatttggctcctgcctctctgatgacagaaagttctgctcacaggtcttagctatattatagccatcttttggctattattttttaattattattattatttttttgagatggagttttgctcttgttgctcaggctggagtgcaacggcacaatcttagttcactgcaacctctgcctcccgggttcaagcgattctcctgcctcagcctctcgagtagctgggattacaggcacgtgccaccatgcccagctaattttgtatttttagtagagacgggatttcaccatgttggtcaggctggtctcgaactcctgacctcaggtgatccacccgtctcagcctcccaaagtgctgggattacaggtgtgagccactgcacccagccccttttagctattattaaaaagtcaaaaaaataacagatgctggtgaggttgtggagaaaaaggaacacttacacaccattggtggaagtgtaaattagttcaaccatcctggaagacagtgtggtgattcctcaaagatcgaaaaacagaattaccattcaacccagcaatcccatcatgcgtgcatgaacatacacatacgtgcatatgttcactgcagcactagtcacaatagcgaagacatggaatcaacctaaatgcccaccaatggtggactgaataaagaaaatgtggtacacatacaccacggaatactatgtagccataaaaaaagagatcatgtcctctgcagggacatggacagagcttgagcccactatctttagcaaactaacacaggaacagaaaactaaatgctgcatgttctcacaagtgggagctaaattatgagaacacatggacacatagagggaaacaacacacactggagcctatcagggatggagggtgggaggagggagaggatcaggaaaaataactaatgggtacgaggtttaatatctggatgatgaaataatctgtccaacaaactcccatgacacaagtttagctatataacaaacctacccctggactaaaattaagaaaaataataaattacagacatttttatctaaacacccactgcatgagaattcccaaatgaacaggagagtcttcatgagatggatgcactgtgaagaatttaaagaacctcctgctgttaagacaactatgttgatttaatattttaaaaccaattatgaaaaaagactaccttctccatccccaatgtctacttctgaacttcccattctatttcaaattaatattttagagccagaaacacactgattcaattgtttagctacaaatgtattataaactcaagctaagcaagtttcccccaacagtcttctttttcaaagttttccaggtatttgtgcacattaatatatcacttccatatgcagcttctttaatcctggtttataaagagatgaaagggtatccaaatgaagtctctaaacagtcactaccacccaacctcactgacaccatggagcctgccccccatacccaatccatgcctaggcataaaaccctttccagaacaatcatctaaacggagccttttccaaagttccgtgttaccgggtcacagtgagatggaatctatgtggagatggaattgagggaaagccctgggtgtgaatatacatattagtcaggacacttcagagtcagataaaattagcaagtccaaaatatggcatttcaggaaggagaggacaaaacagtgaaccaagaatataacttttacctgagaaagagccattccctcctcttctttctttcctcttcctctgagtttctttctcaggtaagtcagtctgtatgtcaaaaatatgttgtttaatgcttaaaatcaacacaccccctgcctctaccacacacacacaggaagaggcttgatatagaaaaaagatggtccttagcttccaattgcaacaagagtgaaaataaactcatgaaaaaaattaactcctaaacagagactaaggagttattccacctatgtcttcaaaaagttctcccttcttgctgaaacccacacattctgcatcaattgcattgtcctttgtccacctgacactcagccaagaaaaactgttgtgtccaagttcatggccagtatccaatgactgtcagtcaatgcaggatataaaagcctaaaattggaacaggtgaagagccaccatagctccacgaatccctgctgtagccatactaagtagtttagacttttgtcccacaggcagggggaaagcataaaaagatataacgccaggagatgacataataaaacttaagacttacttctgatgtagagatagggagaaagaataaaaagctgagagagaagcagctctcctatctctaaccctatgccccgacccctttcctagtagtttccatcatttttggaggtctcagagtcatttaagactaactgtaactgggcaccctctctcaaaaaattgccacatgcagacacatgctcaatcctgaaaatcatttcagggatcccatcggctcagattcagaatttctggtatacccatcatctccacgttacaggtgggcacactgagcctcagagagaggagatatttcaccaagttacctggaaaaggtctgagttgagtgagcagaactcagttgtaaatgaatgttgaaatggtggcctggatagggcagtagcaaaggtttgtccttatttccagatcaccattcacattcctgagtagaaacttctatttcatgggtttaattgatcccaaggatttaactcttttccagaaaaatattcaaaaatatgaaattacaaatagctattactcttggaaagcatgaaagggggtcagctgtggagattagtgctgagtaatctcttcattatgaacagacgggctctgttggaacaaaattccacaccaatccaggccattcttcaacatcttgcagagaaaggacaaaggggacctggaggaacatctacttagtgggaggcttttagatgacataagggagtaaagaaactgaatacagctgagccttgagcaacaccagtagtgatggggtgctaatcgcaccccacctccagtcaaaaatccaggtataacttttgatttcccaaaaacttaactactgataacccattgttgaccagaagtctactgaaaacataaacagttgattaacacatattttgtatgttacatgtattatatactgtattcttataaaaaagtaagctagagaaaagataatgtgattaagaaaatcataaagaagggaaaatatatttaccattcattaagaagaagtggatcatcacagttcatcttcctcgcatcctccccgaggtcatattgtgtgggctgcagtggaaaaggaagagaagaggttcattttgctgtgtcaggagtggcaggggtagaagaaaatcccctgtatagttgtacctgcttagctcaaactggtgttgttcaaggtcaactgtattaaactaactggttaaaccagattttaagtggtaaaagattatcaacaccttagagtgaaacactgtgaaatcaagtaccagacataaaagaatagttccaatatatgataaaaagtagaaagcatttaggccaggcgcggtggctcacgcctgtaatcccagtgctttgagaggcggagacagatcacctgaggtcaggagttcgagaccagcctggctaacaaggtgaaaatcccgtctctgctaaaaatacaaattcaccgggcatggtggcgcatgcctttaatcccagccactcgggaggctaaggcaggagaatcgcttgaaccctggaggcggaggttgcagtgagccgagatcaagccactgcactccagcctgggtgacagagtgagactccgtctcaaaaaaataaataaataaataaaagaaagcaaaagaaagcatttaaacctcataagctgaacaatacatttaagagaaaatactttgaaaattttttttaaatccaataaattatggaattacatttaagacaagttgaatacacgtcaaatttagaaaatgacacaagccacacacaaaaaaggagggaataatattgttaatgtctgtttgcaaaagcagcatacggtgtcacagtttcttcccatttcttgactctcctcaagatcagagaaagggaagagggtgagctggaattaactgagctaagtcagttaaccctctggctgaataagggttgcttctgatgtaataattagaaaacgcagaagcctcacaccgtagttttgcaattttcatgctcttctgcacaaacaatgaagcaaattttaaattaattatagagccatacatcagtacttcacaacttaatgttccatattaaatcaatccacactcacatggatttgggtgcccccccctttctccaccattatgtgatttttttccccctctctataaatgtttctcttccaccttctgtttctttccttttctttttcccatttcggcgttttcctgtccctttctgctcatttggcttcccttcctctccttctctgacagagtgtttggccccatcctggtagcatcctttttttcagtccctgctattgtttctgatggctctctaatttcgcgcatttctccctctttatcctccatttctgcttcccctctgttctccctggagaagggcgaagggtgtgtatccaccccgagtgagggctttaccagggggagggaagagggagtcagagaagagttttaagcagagaaacgacgcggtgggcggtcggtgtccacactgacctaaagcaaaaaggtcggggccagtacccacttcagaacgattttaatccgaaatggacgcagatctctagaccctctcggagcgacgggactgggaacgtcttagggccacgccgcgagaggaatgagcaggttcggggttttaacctacagggcgaccccaaaacccgacagcggagcgtgggaacctgtggcccgcgaggcgcaggcttgaacccgaaagacggagactcacccgagagcgccagtagccccgcgagatccgcttccgggtcggcaggaacctgcgcgtacgcgagtgcactggggcggcgcaaggggcaagggcaggggcagggcgcggacaactgtggggatgggcgggcaaatggcggggatgggcggggacaatggcgggatgggcggggacaatggcgggatgggcggggcctaggggtcggactgccggacctctcctcggcgcgtcccagcgacttttttaggcctgtttgtcgcccagcagtactcgattcttcacttttggattcccttgaatctctatggtgtcctttggagcctagctaagtaaaaaattagagacctgtgggccccttatattggaatcggagcttaagatgggaaaggtttgcttgaaaacgtttctgcgagcgatggaggcgcgtcctgcgacgaggcgggaggagcgctgggacctggtggatgggagagggcgacggtataaggaagctcttggatccaggaacttctgaaatccggacgattaaaatttgtatttaattaagcgaaagctggagttgtctgcgtaggtgatggaaactggaatgagatgcatttttgtgcctgtgcggagtgtacaattttatattgactttcactggaacgtaatttttatttccgctccccagtcacccaggaggcagagatgcaccatgggctgagttccagagaatttatggggtcagaccctgggcggtggggggtggaaggctgaggcttggctttaaaagaacgcaaagttctgcttgtatcgatctaaatttattttcctttattatcctaatgcacatttcttgagataaattacaaatccaagtgctggatttattggagttggtatgttgtgttttgtctaagttattaattactaatatactatcgttattattatttttattattattttgagatggagtctctgtttcccaggctggattgtaatggcgcgatctcggctcacggcaacctacgcctcctgggtcaagcgattttcctgcctcagcctcccgagtacctgggactacaggcgtgtgccaccatgcctggctaatttttgcatttttagtagagacggggtttcaccacgttagccaggttggtctgggacccctgagctcatgtgatccgcccacctgggcctcatgaagtgctggggttataggcgtgagccaccgctcctggcctttagtctgtaaagtctttattctcagttatttggaagagtatttttaacataatatgtgcttggcaattctcctggccaactgaattgatttctcttgggcccagagaggaaacttattgactggaggctccccaagagaagatgagcccatatgggggtatctgagtaaaccaaggtctatccactgtctctttgggtctctgttttcgtaactgggaattacatctgataacaggtgaagggtgaaaaaaaaatgagagtgcattttagcataaaaatacatatatgttatttacatataaacatacacatataaaaattctatttattttacatataaaaatacatatatgtatttaaattttttttttttgagacggagtctcacccgtacagacggggtttcaccgtattagctacgatgtctcgatcttttgaccttgtgacccacccatcttggcctcccaaagtgctgggattacaggtgtgagccacagcgcccagcctctttctcttttcaatgtattaaatgcacaagattccatactttcaaattccattttgcagaattattatattttcataggtttcccaaatcaaatattaattcaagtttcagttagttgttttaaaataataaatatatagttacataatctttaaaatgattcgttttctagcctaaaatgctttatcaccttttatgtttcatgtctcatattttagtgcacactctacctaatgttgtacattaatttccgtgatgggtgccgtagtatttttagtctttgcagacagtgaaatgagtgtttctgctggtatcttaacatctactcacattaaatacattgggtcatatgaaattatttagtgcctattataacttatcaagacctatgaatattcactcataagttatattgatatgtagaataaatactttgacaaaaataggaaattatcaaaccaaatttataaagtgaacatgacaaatatttatacatatgtaggtgtgcgtgtatgtatgtgtgtgtgtatatgtatatatatgtgtgtatagatatataaaggacacaactaggcaactattatagcgtagtagtgaacaccaatgttactgcaaccaggctactcacgttcaaatcttcactcttctggtatttaaatgagtcacctaatctccttgtgcttaaactcttttagagttggtgaaaggagaataatatgaattcctacctcatggagttgtgaatattaaatgtcagaataggtacagcatttataaaagtcactcatacattgtaggtgctgtaaaaagaaatacacgaaatgggaaatttgttaacaatatatctctctatatatttcacttttaatattcagggggaagaaatcgtcataagtgaaaggttattttccatgaaaatgtggcccacaactcgtgttgccatgcagaaccttctgcttactcaatattgagtgctggaaaatgacagaatggcctctgtggacctgaaaattggaatgatcttcctatttgtgggcagcaagccacccagctgccgaggcaagagaccgagggcacgagctgttccagcataataaaatatataaaacaacaagagttatattagatctagatcatagacatgattatatatgaatatcattaatcattagttggtagcaattactcttattccaatattataataatcctcgctctataatcataacctaggaaaagccaggccatacagagataggagctgaggagacatagtgaaaagtgaccagaagacaagagcgcgagccttctgttacgcccagacagggccaccagagggctccttggtctaggggtaacgccagcgtgtgggaagacgcccgttgccaagtggaccgtggtctagcggtagcgttagtgtcagggaaaaacacccgctatttagcagaccgggaaagggagtctccctttccctgggggagtttagagaagactctactcctccacctcttgtggagggcctgactcagtaccacctgcagttatccagaggcctgtctccctgtgatgctgtgcttcagtggtcacgctcctggtctgccttcatgttccatcttgtacacctggctctgccttctagatagcagtagtaaaattagtgaaagtactaaaagtctctgatatgcaaaaataatggcataagctgtctctctctctccctctctctctctctgccttggctgccaggcagggaagggccccctgtccagtggacacgtgacccacgtgaccttacctatcattggagatgactcacactctttaccctaccccttttgctttgtatccaataaatatcagcgcagcctggcatttggggccactaccagtctcctgctttgtatccaataaatatcagtgcagcctggcattcggggccactaccggtctccgcgtcttggtggtagtggtcccccagacacagctgtcttttctttcatctctttgtcttgtgtctttatttctacactctcttgtctctgcacacggagagaaacccaccaaacctgtggggctggaccctacactattccaggtagttgttggaatcctggggaatttttcactcttatattattatatgttcctttactttaggggatacaagccaagatccacagatttgattctcaggcacctgactgtagctgactccttggttatcctatctaaaagaatcccagagaccatggcaacttttgggttgaaacattttgacaattattttggatgcaaatttcttttgtatgcacacagggtaggcaggggtgtgtccattggaagcacctgcctcttgagtgtcttccaggtgatcaccatcaaccctaggaactccaggtgggcagagatgaaagtaaaagccccgacatacattggtctctccaatatcctgtgctgggccttccacatgctggtaaatgccatttttcctatttatacaactggcaaatggagcaacaacaacatcacaaagaaaggagatttgggatattgttctgccccacttagtgatgaagtcacaaagtcagtatatgcagcattgacatccttccatgatgttttgtgtctggggctcatgctctgggccagcagctccatcgttttggtcttgtacaggcacaaacagcaggtacaacacatctgtaggaacaatctctaccccaactcttctcctgggaacagagccatccaaagcatccttgcattggtgagcacctttgcattatgttacgccctttccttcatcacctacgtttatttagctctcttcgataattccagttggtggctagtgaacactgctgcactaatcattgcctgttttccaactattagcccttttgttctcatgtgccgtgaccccagcagatccaggctctgcagtatctgctgcagaagaaatagacgattctttcatgatttcaggaaaatgtgaattggctgtcttggtttatgttcggccactgatgcactcagacctcaagggatcttaagaatgattatcagccaatttcactgcagagagaggggtgaataagacagagacttatccaatgtgaaatactaaataataatagccatagtaaatgaaatcttatgtaattaacatgtgagtacttatatagttgtattttttattaatgattgcagtgaagaacttcagattccataaaatagtcctgaaataatgtatagatactgaaagcatctttaaatgtgtgatgtccaatctgagatattaaattttcctaagacgtactagagcttggaattgtataaatgggcatagcagttgcctaaatgggcatagcatgtgggtggttgttatggtttggatatttgacctcttgaaatctcattttgaaattgtgccttacatcccataaaaaaactgtggacatttgaaatatgataatgtttattgagaaagattagtatattaaaatatttccaggtaaacatttgaagaatgatccataagagacaaaaaggaatatagggagctgtgtcagctcacttttacaaagggtgcagatggggccaggcatggtggctcacacctgtaatcccagcactttgggaggctcaggtgggcggatcacctgaagtcaggagttcaagaccagcctggccaacatggcaaaaccctgtctgtactaaaatacaaaatttagcctggcatgatggcgggcacctgtaaacccagctattcgcaaggctaaggcaggagaatcacttgaacccaggaggtggaggttgcagtgagccaagatcgtaccactgcaccccagcctgggtgacagagtgagactgtctcaaaaacaaacaaagggtgcacataggagacaacaagtaaatagagatttggcaggtgggaaagaaattgaatggatttttgagatattcaaaaggtagattgttctgggtaagccttgatagagctggctatagtggcaagaagtaggtttcaggatggactttttcatttccaacttgagacaagtttttggaataaacttcctcagccttggagcagcagatgaatacaatttggagccaaaatacatgaatttgttttgtttaatgcagaactttttttttttttttttttttttttgagacagagtctccctgttacccaggctggagtgtagtggcacgatctcagctcgctgaggcaggcaacctttgcttcctgggttcaagtgattctcttgcctcagcctcccgaatagctgggattataggtgcgcaccaccatgcctggctaatttttgtatttttagtagagacagggtttcaccatgttggccaggctgctctcaaacccctgacctcaagtgatccgcccgccaaggcctcccaaagtgctgggattacaggtgtgagccactgtgtctggcctaatgcagagttttatattgattttgaagtcaccaagaaagcaaaatgaacaccttcaaaagaaataaaaaggataaggccgggcgcggtggctcacacctgtaatcccagcactttgggaggccaagcgggtggagcacaaggtcaggagattgagaccatcctggctaacacggtgaaacccactctctactaaaaatacaaaaaattagccaggcatggtggcaggcgcctgtagtcccagctagtggggaggctgagacaggagaatggcgtgaacccgggaggcggagcttgcagtgagtggagatcgcgccactgcactccagcctgggcaacacagcgagactccctctcaaaaaataataaaaaggatattaattcaaacataggaaatattttaatatgatcctctgtaaattataaacggttataattttttaaattaaacattttattgtagaataattgtagatctgaagaaaatttgcaagtataacacagagagttctgaaatatccgtcacccagtgtccctcatgtaaacatgttgccatgaaacatttgtcaagactaggaaatgaacgttggttcattcctcttaactgactttatttatatttcaccggttttaacacagtctttcttctctttcagggtccagtccaggacatcacattacgtttagtcatcttgcctccccagcccgttttgctctgtgtttttgtttttcatgatcttgacaactttgaagagcattgttttacttttagaatgtcgctaaaattgaatttgtctgttgtttatctcatggatagactagttttatgggttttggggaagaaaaccacacttgtcacatcatatactgtcagaagtctaaggaaatttggatgagttatctctggtgatgttaatcttgatcagttagttaagatagtgtttgtcaagtttcttcactatatggttactgtgttttcctttccacactctaatctttggaagggagtttctaagcccatcacacacacttaaagtgagtatgtgtgtttgtgtgaaaggggcattgaattaaccttcacctgctgggaggtatccacatagattatttgccatccttctgtaaggaagatatgtcttttctccttcatttatttgtttgttcaattatttattcatatcaacatgaactcattgatatttatattttgttatataattcaatgctaaggaattaattttgttacttaagtttttgcagctttggtcactggaagttgtggaataataaaaaatatatatctggtcttcatcctggttcctgttacagagcttcaaaatctttttttttttttttgaggtgaagttttgctctgttgcccaggctggagtgccgtggcgtgatctcggctcactgcaacctccaccttccgggttcaagcaattcccctgcctcagcctcccaagtagctgggattacaggtgcacagcaccacgcctggctaatttttgtatttttagtagagacggggttttgccatgttggccagcctggtcttaaactctggacctccggcgatccacctgccatggcctcccgaagtgctgggattacaggtgtgagccaccgcgactggcctagagcttcataatctttttgaatttcctgaatgatgaatgcctttgtcatattcacgagatgactcgtggcacgggtccctacatagctttacaatgaggactggtcaccagaaagaccaattatgtaattagaagaactttcagccaccagaccactggaaagggaagaggctagagattgagttcaagctcatggccgttgaattaatcaaccatgcctaggtaattaaactctgataaaaaattcagacatgaaagcttgggggagctttctggcatgggacaaaccacataatagaaaataaaattgcaaagtaaactaataaagtcttcaaaaaagaggttatcactcaaagtcttctcttctagctatcttgaaatatacatgacattgtgatttgctatagtcatctcactgtgtagtagaaactattcttcttggctaattaactttgtaccaattgatgaacatctcccagcagcagtcccccaccccttccctcctgggcctctggtaaccactattctaccctctacttctatgaaatcaacttttttagatttcacatgagtgagatcatgcagtatttgtctttctatgtctggcttatttcagtaacataatgtcctccaagttcatgcatgttgccacaaatgacaggattttattttgttttatggctgaatagtatttcattgtgtatatataccacatttctttatttgttcatctttgtatgagcatttaggttgatttcatatctggactattgtgaatagtgctgcaataaacatgggactgtagatatctctttgacatactgatttcatttcctttgcacgtatatccagtaagaagattgctggattacatggtagttctatttttaattttttgaagaatctccaaactgctttccataatggcttcactaatttgcattcctaacactacaaagaaatgataaatgtttaaagcaattaacatggtaattaccagcatatgattattatacaatgtatacatgtattgaaacatcacataataccccataaatatgtactattattatgtgtcaattacaaattaaaaattagtgaaaaaaggggttaccaaatgtctaataaacaaagaaaatatgctcaattgccttagtattcagggaaataaacataaaaccgctaactagtactcaaatacactaaccagaaggctaaaatgaaaatgacagaatataccaagggttgaccatgacgtgaataaactaatgatctcacactgctgagggttgtgaaaattggtgtaaacctgttggaaaactatttgtcagtgtctgaaacagcttaacagacacaaaattatgttaagtagaacttaacaattctactactgtatatatacatatctctctcaaataaactcatacgtgtgtcaccaaaccacaagagagatatatatatatatatatctcaaataaattcatacatgtgtcaccaaaacacaagttctagaatgtatataccagcattattcataatagccccaaactgaaaactactcacatgtacatcgagaatggaatgattaagttaatagatatttacacaatggaattctatgcagcaatgctagtgaatgatccacaaccacctgcaaaaatacagacatattcacaaacaacatatacaatacaagatgccagatacagaataggttattttgtatgattccacttacaggaagtgcaaaacacatcaaagtgatcgatgctatgagatgtctgaatagtgctgaatccttgggagtcatgacaggaaggagtgcatggggacaccttgggttccaggaatagcctgttttttcatctagaagatgcataggagatgcgttcaggttttaaaatttcatagagctgtgcacatttacacagctgggagatggtacataggttacaatttagagaactgggagatggtaaataggttagggttttaatgtgccaatattgccaaggtgaaagttaaaggtcttacataactttatgattattttatagaagtaatttcaaaatgtaaaacgaagatagtgagtacaaaaccttctaaacaaaagtgcaaaatgtagaattgctttaaaaatgttttaaaaacacagaagttaaaatagaaagaataagaaaatagggaaagtgtaaagaacacagaataaattggtaaacataatcctgaatatatccattattacattaaactgaaacagacaaataatttttgttatagtaacattgtttgactataattaattgaatattttagacagatacataaaacattacgaaaaatatacaataacgaaaaatacattctatgtaattttaaccaattaaacaactagcatggctatgtaaataacacatgaaatagacttcatagttggtttaacttgtcactattataattaatatttttctacatttcttaatgtaaacatttctaatattccttggtagatagcaaacataatgccacttactataaacatacacacaggtatgttccatcttgctttgtgatctaatgtgcagtacataatcctaagtgcctcatacaagttaaaaatgtttccttattttcgttcatgaagttcaatacgttaagtcaaacgaattcttttgttcgatgaactattgaatctttaatactttgcatcagcttcataatgaaaataaagactcagtatgttagattgtttcttataattggggcataagcattttgctcctttggaagtctacctgtcataatctccacacgaacacagtggattcatactttctccctcaatatagccatttctctgctatttcaagtaaatttgaaggaaatgaatgtctgtgctcacttgctcaccttagaggtaggaaaacgcaacccccaaatctctttctttccaacatggccaactggcatcttcacatgataaagaaaaagagtctaccatctactcgtctagatcctcaaatctatgcagtctcacagagtgtgtgtggttttctgttgttgttattgttgttgtttgtttgtttgctttgaggccgggtctcactcccttagcccaggctggagtgcagtggcgcgatctcggctcactgcaagctctacttcctgggcttcaagtgattcttccatctcagcctcccaagtacctgggtctacaggcatgtgctaccatgcctaggtaatttttttcatatttttagtagagatgaggttccgacacgttgcccaggatggtctcgaactgctgggctcaagccatcctcccgccttggcctcccagaatgctgggactacaggcatgagccagcacgcccagtcagcatctgctttttaatagtcagcattcacaggatgtttttaattttggcataaatatatttttttgtctcattcttgatcagtgtaaccatttctacatgaaaatgatttaaatatactgatttccctccatatagttatattttaaattactattatctgtctgaggatgtaacgtacagattttataacttgggacccaaatctggaattaaccaaaacctcgcctccaagcaacctcattacttcaggagaacatttttttcttcactttcctgaatggtcatatcacacactgctacttgtcatgtaactttttcaacaatctcacgcttacttaatttctgcatagatttattatatcagatcgaaggttgcacactcaaagagatccccatcattgccagattgattcaggacctaatttttttaattgcgtagacctttaatgactctactgcaggccttaataaaactttgataatatgaatatttacataataattgcatcatatttcatttacaattgttcttactagttattgtttatcattggggtggaagttcaccctgtcttgttcatcaccttctcataattgggagaggttcataattaagattacattgcggcacagaagagtaagtcatcaattgaaccatgagcaaatatatacaatgtacatgtttatgatgaggttaggagatcttgtcatcttttccaggcaaaacaaaacctgtatacactggggtcacagctcatgagaacaaaggggctgagagttgggaaacatacactcattaaggctgaagtgttcaccagtaaactattgggattatccaaaagagccatacaaacttggaaaaggcaggagagagtgtaagaagacacaaaggtgctcaccaggatgaggatgctctgcgtagctctgttctctggggaggctctgggggagagattgctcctatcaatgtgctggacccgctgcttgtgcctgtgcagtatgcaaaccatggagctgctgacccagagcatgagccccagacacaacacatcagggaatgataacaacattgcacgcagtgtctgtgcgattttgttgttgcctcccccagaacagtatcccaaatcctcgttcactgtgatgtttgtgtagttccatttgccagtcacatacatgggaaagatgatgtttaccaacatgcacacgatccagcacaggagaacagaaaagccaacatgcttgggggctttctctttaagttttgcccacctggatttcctggagctgaccgtgatcacctggaagacactcaagaggcaggtggtgccaatggacactcccctgcccactctatggagatagaaaacaagtttgcacccaagagcattgagaaaatatctaaccccaaaagctgccattgtctgggggactcctttacagcggagagctaagaagttggctacaatcaggtgcttaacaatcaaatctgtggaccttaacctgcacccagtgcagtaaaaggagagataatggagaagaacagagaagctccccaggactcccaccacggtctgtgataagatcattcccactgccacataccgggaggccattctgccactgatgtctgtcactgatgtttgtcttcagggctgggaggtcctgcatggaaataggaggcatgagctacgtttatagtgtcacctgcaacccagcattctccacctcccattgctctgcccttagaaatacttaaagtcactcttctcttaagaggcttttgagagttgaatgcgtaacctttaaagagcacttcccatgtgggaatcactgctgtgcagatcatacgtgcggcaacttctttattcacaaacctatgaggcaggcattactattactttcattgtaaatatgagaaggacatacacacagagaggtgaagtggctggcaacatttccaccctacttacaggcaaaatgcgaacttgaacctgcctggttttattgcaaagacagtgcatttagccgttatagttgactaacaaagctagatagctgtgttctttgaataagacacacacacacacacacacacacacacacacacacacacacatacacacacacacccctttgtttttattccttgtcattatatttcagtcttgtagtaggttactgtatgttgtaatgattttacattatgtgtaaaaatgtattctatttgtcaatatccaaataaataaaggtttagagatcttaaaaaatgtagatgcagggattacagtttgatactatagaaacctgcaccatgacaagttggatttaatgactgcaagcatggatcaatattagaatggaaagagagtaaaaaacattgtgagcatttgcttttgtgccacggacaaaggcataaaggcacctaccacaatcatgtcttacccaaaacaataggacatgaaacaacaatatgggataaaatagtgtaaggtaataaccaaattcttacaaatgttagatgacatatctagatctattaataactgagttaaataaattattatccttaggacaatatttgcataactaaattaaaatgtgacaaacgtgaaaattggaaactctagtgggtgtatattatatatactttgtaaacggaaattagagagtttgggtgatgttagaatctatctgaagcagagaacacatcagaggacacatttgagtctgatagctgctctctttagctcattattataaagttaccttttccttaaatgctgcctccttaacatcaagaggaaagacagtctcaccataatcaacagactatggcagttttcagtagagacacaattaatgctcccattaagccctgcacactctcagaattagagaaaacattttcgttccagcaactactaattagatacactgtttgtgtaaggaattacatgactcctgtagagtcaatctattcattacaagtatggtgatattatagtcatttcctcagcaatcctgaaattttagtgtataattcctgttgggtaggcggaacagcagattgattttagtaccacagtccttaagaatgcaaccagctttcattattacgacagattgatttaagaatgttagtccttaagaacatagtcaggtttcactgttatttggtgaaaaaccaacagtgcgggtcagtgtggattctcctaaatcacatcaggaccgcccaaggattggtgtggggctaggaccccatttctctttagtagctcagctcatggctcacaaccattcctcttttcttggtgacttgggggttagactagttttcttttttttttttttttattgatcattcttgggtgtttctcgcagagggggatttggcagggtcataggacaatggtggagggaaggtcagcagataaacaagtgaacaaaggtctctggttttcctaggcagaggaccctgcggccttccgcagtgtttgtgtccctgggtacttgagattagggagtggtgatgactcttaaggagcatgctgccttcaagcatctgtttaacaaagcacaccttgcaccgcccttaatccatttaaccctgagtggacacagcacatgtttcagagagcacagggttgggggtaaggtcacagatcaacaggatcccaaggcagaagaatttttcttagtacagaacaaaatgaaaagtctcccatgtctacctctttctacacagacacggcaaccatccgatttctcaatcttttcccccacgcttcccccctttctattccacaaaaccgccattgtcatcctggcccgttctcaatgagctgttgggcacacctcccagacggggtggtggccgggcagaggggctcctcacttcccagtaggggcggccgggcagaggcgcccctcaccttctggacggggtggctgccgggcggaggggctcctctcttctcagacggggcggccgggcagaggcgctcctcacttcccagatggggcggcggggcagagacgctccccacatcccagacgatgggcggccgggcagagacgctcctcacttcctagatgtgatggcggccgggaagacacgctcctcacttcccagactgggcagccaggcagaggggctcctcacatcccagacgatgggcggccaggcagagacgctcctcacttcccagacggggtggcggccgggcagaggctgcaatctcggctctttgggaggccaaggcaggcggctgggaggtggaggttgtagcgagccgagatcacgccactgcactccagcctgggcaccattgagcactgagtgaacgcgactccgtctgcaatcccggcacctcgggaggccgaggctggcggatcactcgcggctaggagctggagaccagcctggccatcacagcgaaaccccgtctccaccaaaaaaatatgaaaaccagtcaggcgtggcggcgcgcacctgcaattgcaggcactcggcaggctgaggcaggagaatcaggcagggaggttgcagtgagccgagatggcagcagtacagtccagcttcggctcggcatcagagggagaccgtggaaagagagggagagggagaccgtggggagagggagaccatggggagagggagagggagagggagagggagagggagagggagagggagagggagagggagagggagagggactagttttcaatctagaacaatttcttattataataggataacttaccctggctcctgggaggcacccttccctacagactgaaacagaaactttctccccagctccatcttgctgctaggacggtgggctcagtgcgaaggttgccacagccaggatcatgtgggagggaagcagccagaccctgagatatgggtttgtggttctgtgacctcacctcccctcagaactgcaattatcttttcacctgcagtggcaacgacagtgcagccttggggagctgagaacgtttcagaacaacttttcttcccaattgctaatcaccaaaagcaatgacaagtttctggccagcatctcttcagagactatgaggagtgtttgggagaggctctttcgtctccattccctggagagacacagtcttacatggagggagcaggaaacgctgagttctgacctgtggcacactcacagtgagggacgagtgtccccggatactctgctttgctgggaggttctgccccaaagcgagctctttcctaatcttcatgccactcagctgcagcatcattagattatgtgcagagaagtgaacccagacagagtgcctgagaaggattttcaaagggatacaagtaaaaggacaaacaggatgccaacggctcaatgccaattaatttggaatctagatgatgtggatcaggtggctaaaaagtcacgctttgatcaatcctgggaagcaaatactgcttactagattcaagagcattggatggttgccacagtcctctacatttgtatgtgtgtgtgtgtttctgaatgttcagtaatgatcactgattgctcttgtaataaattaagaaatataaaatgtgaattcaagttaatcttttgggttttcctacaaacaaatgttattcaggccctccattcaatgcatctcagtttccatgtcagggattagagccataaggtgaacaacccctaccgtacacaaagacgtatattcacacatagatgtacacacacaggtgcaaacacatgcatacgtgcacagcagcacaaatcaaaggaacatcacatacatatacacagctagacactcgccctcacatacatattccaccacaggctcacacccacccacacacctatcacaaacccacactcatattcaaatacactcactatgcccagcactcacacagactcacacagtcccactgacctttaaacaccacactcgcagagtcagcacacgcatttgtatcttgataccaggttcctatctggagaatagcggcggtcatgcctctattgtgattcagcctttatacttcttctcactttgcaccactcatgatgatgacgtcaccatgtgcaatgtataaaatgatgtgcacgttgctaatttggtccaaggcattaagtagaaaagttggagtactggggtcgatattgcatgggtgtgtgacagagggtctgatattgcgtgggtgtgtgacagagtgtgacattgcacaggtttgtgacatagggtaaatctgggggctcatggaaaggacgctattgaggcagagcacctgtaaatgtagattgacggtgaacaggagacagagcacagaggcttaaaagggacaaggaggttaatttccagacagtggaagatgccgtaggttttaagggtgcacaggggaaaagcgtgcaaggagctaagcatatgggggatactaggtgctgtgaggacaaggggtgccagagtcatggaatgaaaggagacgatggggaggtagagataatgagggaaagtgggtaaacagcaggacagggttcaagacaccggcgacttgatgtcaatggaaggttaaagaaaatgaggggaagggaagtaacaggtggggtgcacaggtcctgggagtggtcagtgacccaaagtggagacggggatgggaatggtggaaggaactacgtatatgtcgtaggcctgggaggaaaatgagagcagggtgatgagaggaactggaagggtcatgggaatgagcagccaatgggtttgggggaagagggcagggactagagagttctgggagaagggttggagggctggggaagctgaggacatcgggaggttgattgctgggacatttgaaggagaagggcatggagattatggaatatgggctgagatcattggaatgtggattgatttagggcttaggagaaggaggacatggaaggtggagagtgtgggggcagtgggaggtggggagggcttgcctgacttccccacaatggatgatacagaggtgctggaggcatggaggccaagaagggcatgagatagcggtggggtccaacgtagaagtctaaagctgtcaggaggatgggggagtggattgatgtggaggcccgggtggtgactaagggtcataatggtggtgagagggaggccacaggggagatgaaggaggagggaggaactacatggaggttggggtcgtggaaggcactggggaagattggaggtcactaattcattctccattcatcatctctctcatttacagtggactcacaactgagtcatggatagactctagttccagttcgtgaagagcaaattatgattctgtaaaacacccccaagaatgcttaaaagttaacatgcagtagagggccacagggagcatctgggatgtgcaacatgccacagcattttctcttctccttcaggacaccaggtacagaatgtgactgcagtgggtccggcaggagaggctgtttcctggcacctggtgctcagtgatagaaggaggtgtcagaaggccccttcctgcttctgtggatgtcttgagtttattttgtgtcccaaattcaaaagtatgagcttcttttatttattgtggtatttccaaaatatggcacatgcatattaatagcatatagtaatatgccattaaaatatagcatattaagaaaataaaatacagaattcaacatttgagcactctttccttttgcttttctgtcactggaaaccatcacaagaggtgaagagtggtaatcattttgttgatacattgagaatattttttcaataatattttatcatcaaaaaatgcattggctggttctccaacccctggtgttatcgtgtggttatgttaagttccacgtaggcaaaagagactttgtggtataattaacaatcagctgaaatgaacccgggagattatcctggatgatctaggcgagtctaatgtaatcagctgagctcttaaagcagacaaagaagttagagacaccgccaaagaggaagtcatggcttggagggaagagggggatttcacaggctgttgctggctctgaagacgataggcaggtggaaatcatgagaagaaaaggggatttgtcagccacctaaatgatcgtagaagcagagattctcccctgtggaagcagattctctcccaagcttgcagagaaaagcccaggcagctgaccccgggattcagaccttgtgagaccctgagcggaggacacagccaagcactgtgggcttctgacctacggggaaaaaataaatgggtgctgttgtaaggcgctgaatttgtgtaatggtggagtcatgggaaactgataagtacaggatccaatttaatgacaaaatgtttaaacagttaaataaaatgagctataaataccgcagcaaagatacaaggctgatcccaggcataacaattgttaccagtttgagatgtatcctcctttatatattgatagctctataaatacatctctctctatatatagagagagagatacatgtatgaagatcttatatatagacagatatagatctatatcttcatatctatatctaaatgtagagttacagagacatagatctatagagatagacatagatacaaatatagataaatatgtagacacacatatatgtttgcatagatggacatatacatagataggtctatttgtatatatacatacacatatacattataaggcattttgtcttccttcaaaattcatataaatatatgttcatgttggagtcactgttcgtgttgcttcacccagtcagtgatgagtgtggaagatgtttctatacctccttctcggaaacaccgcatcctatttcctggcacgtatgcatgaagcatgtcactgaatcgctcctgtttacccctgtacagagtcgcatgtgcttgtctgtctcctgctgtgaaatgctgcagggagtgtaggtggctgaaaaaacaatacttttatcctgtaattgataatgctgaacgtgagattttatttttgcatggggtcagacagtctgtagtatatgattgtgggaggaagaagtgggtaaagaaatcaataatattttatcattgaaaagaatgcgtgaatatgcactattactgtttgtcaatttaaaaataaattaattaaatataaacagtaggcaccccaaaactttttgaatctattacacatatgcaataaaaagaatgcagtatgattagaaacatcgttttctaagaaaaaaactattttttccatcatcgaaagtactcaacctaagattttatttttgcgtggggtcgaaaggtacatagtacatgcttgagggtggaagaattgggtacagaagtcagctacaggtagttttttgttttaaaagggtatgcgactttttaaaacataaacttaattgacaaataacaactgtacatatttacggagtacattgtgatgctttgatatatgtatatgttgtggaatgatgaagtcaatcagttttatacccattattgacatagctatcacttttttggcaagaacatttgaaattcactctcttagtaattgtgtatatttacagtatgcattattatgaactacagtcatcatccggtgccatagatcttaaaaaattattcctcctttctcactgtgcatgaatttttaagataaatgcagtggaggtcaaaggattaatgcaagcaaagatgtttcagggaagaagttttagcagttctgcttcataaaaatggtaatttaacctgtttcagttttctggacaatatgagcatttggattttttgaaagcaagtgaatttcttattgatggcaaaacaaaacaaaaccatgatgttttcagagagagaacacagcaattgacccaggacaggacatttacctgagaacatgcctttcctatctcctaatccttctcttgctcttccttattcccagagcttcttcctcagatgagattatcttgggaaatcccacgtgaattttgaaaatatgcctttttaacttcgttttctcttccccacaccaccactgcacccacgggcagaaggaacttgaaatggagaaagggcaacctctgcctctgtcctttgtcacaggagaggttcaggaagcctgtgggtgacaaacccacctgaataggccagacagaccccacaccctgatatctctgtgagaattcttgggaacactcctttatcaggtccttccttgcattgctgtaaagaaatacatgaggctcggtcatattaaagaaaagagaatgaacatgctcatggttctgcaggctgtacgggaaatattgcagcatctttctctagggaggcctcaggaagcttttactcatggtggaaggcaaagagggattaggcatttcacatggcaaaagcagggacaagagagtgtggaggcaggtgctggacactgttaaatgaccagatctcatgagaactcacttactctggaaaggacacaaccacaggggaggaggctaaaccattcatgagaaaaccgcccccacaatccaatcatctcccaccaggccccaggtcaaacactggggatgacatttcaataggagatttgggcggggacacacatccaaactatatcaactcccatctcgtctctgcagagaggcaagtcttcactccagccctaattcccaaatgctgcccagacctcaggatctttaaatcctggtgagttgctgagctcctgtccacaccctggagctgtgcctgccttcctgttcccatcagagccactgactctttccaggagctgtccctggaactgagagttggcttcttgcagttctccccatctgacatgggcttttaaaaattccatggatacatggagagtttgggtgacccatcccccatagccacactgcatactctagtccattcctggactcacagtgagccagactgttcttagacctcactcatccttggtcccacaagggccagaatctccagtcctggtttccactgagctccctgccatgggagactgagctgctcatcccctttcgagatacagaatgaaacagcctgggcttatgtatgaacattttaaacatgcagaaaatagtgtatgttgttcaaaatatatagttctaggttaagttaaacaaattatgggacgggcaaacagcaaattatattatttgtttcagatgtacacatgtgtgataaaatgaaagtgctagcaacagaataactaagaaatggagaaagagggagaggtgattagatcagatgtgattgcatcatgattaggttagccagggggagtgactgtggggctctggggcagtataaatgccagcaggagaatggatcttcccctcagtgttctttgctgtcttcatcgcagaagccccactgtgaggagtagagtctgcagagggtccacttacctgagcgactgctagagggaaggaagacaacaggttggtacattacaattttgggacttggtttattcccacaggagaaatagaagagtgagaaaactctgtagtgggtggttttagatgtcgaggtaaagattacttaattgcttaatagtgtttcttaagacagagcctgactcaaaaaacgtttcagaaattgtaatgatcgaaaaaatatatattaagaaaaacaaaaagaagaaaaacaaaaaacaaaacgaaaaaaattaaaaacaaaattttaatgatcatataaagatcaacgtttgcaaggaatgctcacccagcaccctgaattgtgtgggtgctggatgagcagttatggagacctggtgcctttgacggagggcttttaaataagagatttcttcacttatcttttgtatcggtatactcattgacgtttgctaggagctggtaaaaattcagggccctgagcctctatacctagattaagccaagcaagacttaggctgtgagcacccaatctataatggtggtataaagaatggttctacttaaatacgtagttaaaaatgtttctttacctctcaattttggcgatttggattttgaagaggaaagcacactttattctagattttcgaatgtgtttgtccccaatgtagcattccctgatctttttttttttttattttcatggcggtattgtcttctctttttcctaatatgatctatgcagataaattttattatctttctatgggcacccatggtaatgtatcctactactgctttcaaataaagaacacgttttcctgttgtattctatttattttttcatctgctccaacttattgtttgatttgccatttccatcttttcatttttgcaatctcatgtttttctgtctctaagctgtctccatggacctgagcacttcccctaaattttatcttttttcaatcatgttgtggcaaaaaaaagatgcccgactgagaccccaggagagggttctttgttctcacacaggaaggaattccaggcgagttgcagagaacagtgagaagagagagtttactgaaagctactgcattacacagtagggcgacctcagaatgtgaccggaaaatgcaccgtctttttttttccttttaagttgttctgatatagagtcttttccatgtgaagatttaactaagctgtgtctacatgcggtgggctgatagcatgacaatgtttagtatcctgttgatttaaagaaaactctccttgacattccagtgtgtagcttaggaaagcatagctatcattatgttgaaggcatctattgctttggatattgggcatctggacattttgctttcataggagtctgtcttgcaagcattgctaagctgcttcctcagccacagacatcttagaaccagggtggtgactggccaggactgtgccttgctagtttcaagaaggagttgatttctaaatggtgttgccctcactctcctatgttcctgtttccctagcactgtggtcatttagacaaagacatttcccctgaacccaggttttgctttgctcatcagtttggacatgaaagggctttacctgtattttctttgcactttctgatttccacttgaatatcttgtttgaacttaaggactttgattgcagaaatttcagagactgtgcttcatagtttaaaacattcttacaatttataaaatgtaggtatatctaattttgacaaacagggactacagattgataagatatccagttttctaatatattaaattttctttgaggccaattccacgatcaatttttccagatgtttgatggtatactatgagggtctctagaggagggacctgcattgcatacatatcaaacacgctaagtccagtgaacaattcttttaatggatcacctgcttttctcattcacattggtgtcatgtcactggcagaggaaggatgcgtccgtgtagtttgaatgacaggatgtgtgagtttactcctagggacacggtgggcacagcagagagatggggctgactgcatcctgtgcctgggagagtccagggataggaaggaatcagcgtctcattttctaccctccacagggaaagagaatccctcgggcaggaccagcagtgatggaccccaacactctctccatggaacaggggaagcagttcttaaagcagtgcgggatcccacaaagagatgtgagtacaggagctgcggggtcacctgggaggcaggtggaatgggtggagtccaagtcgagggggaaggctgaagcaggctccccgtccatgaccggctcatattcagagtttcacaccctccatacacgggcactgacccattaaaatcgatatgtaattcctcaaagggacatgggaaaatgacaccaccactgccccttagttcccacctgggaacagcagcacttcccaataccctgggctttcactcttggcgccatttgaaggtcatcagccaactcctcaccagctctggagtaaagaactgtgagattgcctttgcatcctcatagcttagctcccacacatgagtgagaacataaggtgtttggttttgcattcgtgacttattcacagagaataatagtctccaatcccatccaggttgctgtgaaggccattaatttcttcctttttatggctgagtagtattccatcgtgtgtgtgtatatatataacagttcctttatccaccggttgattgatgggcatttgggctggttccatatttttgcaattgcgaattgtgctgctgtaaacacgcgtgtacaagtatctttttcacataatgacttctttaaaaaaaagaaaagaaaaaaaaaaccaaaacaccaaaatgtgagcctgcccagcattccctttaaaatctcaggaagatgggagttcctcctctcctctgccaaggcttcctcctgcctgcagaactcaggttgcgtctccattctcctttctctgcattagattgacttgatgacagagaaatgggttgttctcgcctctgtggaggttcttctgcgatttcctctgaagccaggagaggatccgaccgcccgctatgtctcaaataaaaaatgccaaccttcagtggactggcccaccacaatttcacagagacgtggataccaagagaagtggtaagacaagtattagggaataagctagggacagcctgggggactccccaagcactgttttcctgttgtattcctgttgtgggctcaaggtttctgctgaacacgcctggaggcttccgtcttgcgtgtccccccatgacacggccagtgatgtgtgcgaagcctggcgtgaacacgcacatatgtgtcagcatcgcaggatcctcagagggctggtcctcgcttggctttgtgcctgcctctgtgtgaagagtggcgtgtggtcacaggggtctcacgtgaaacgtcacgagtgtccataggttgaatatgaaaactttgcaaagctttgagcttctggttggttttctgagtgagaagctattctatgaaaatagtgggttttctggaactagctggaaaaatatcaatagttgttggctgttcatctcttggctttgacaagtattgtcagagggtttcagctctgaggcactgactgcacacaaaccgagagcccagaaaacttttatgcaaggctgcaaatctcacttcgccctctagaaatcaagcagcctttggtttataaaatctgtgtcctgttctgggagtaggtcaggctgggagagagtcacaaaatagcacaactgggacctgggttcagagaggaccaagttacagtgggcgtgactcagtggccagtgcatccctccatccctacttgggtaaataggggtaggagggacttccgtctggtgtctgtgtaatgttttctctttttcttatgactaggaaatccaaccatcatttaatgaagaagaatgatcggaagttcaaggacctgccacagatggcccgtcattccgtccatcatcaggctcagaggccccccagagccaaaaacccacaggagcagcagaggagacccatggggcagacgactctcccagcagagcaggaggaatccagggtcagtgggggcttgaaaatgttggtaacctatggacaccagagagtgggcttgaacatgggactcgtgattatgacttaagagttcccactggtctcagtctgaccacatcggtcagcctcctgtcttggcagattggcccattcggagtctctgaggagcagcctcattctctgtccagtgtcatgtccagcctggtgtttgccgagtcctcaacaccggttcattatcttcactctcagacacaagcgtccttcctcctgggatccctgttaaacgggctctggggaggacgataatatcttgaatttcctggcaaccaacagcccatgggcgtatgtccccctcctaaaataatccatctccaaaacccaggccttgtgtgaaccttgcaggtgcctgtgattgctgttgactcactgctctgtgtcctcctccacctgcaggtgaaatgcaagaactgcggggcctttgggcactcagccaggagcaagacctgccccattaagaggtggagtggggcccttcctctgcaggccctgggctcacacaaggagaaggagaacctgaaaccagcaaaggcccagctaccctttacgactccagggccctttacgacgaatgacagagaaaaggagcgaagtccaaggtaaggattttgcagggtcaaggaagatccgtgaggtcggcgcctcaggagctggtgtctcccctagtctttctgtgcagccttctctaagcacacaaggaaagctccaaatggaggtggatggaggcccctgccttccagggtccgcactccgagcttattccagcgctgagagtctctagagggcaggggctgtgggagacctggggatgttacccgaggcaggcagagcagttccagggcctgaatgaacttagagaacctggggccatggtgggggtggggggcggagcttcctggaagtggggctgcttctgagatgagagaaggggctgtcttggcaaagttcacagaggcctgaacgcctccctcacccaaagcaagggctagggctgggttccgggagggtgcttggttcccagtcactggtgtgagttggaggatcaggcgggtccagacagtgaacgtgatttcttctgcagtccccagcagcagcagagcgaagctccgacgcagacatttcccagaactccccaagagaaaatgcaggaagcctggaaggagccagcagaagattgtttgttcctgagggtgcgtattcccccggcccctgctctgtttctcctctaggtcccctgattccttcactctgtgcccctcatggatgggggtcatgttaagacctaggctgccctgcaggagaactgcgctacccgaggacttcccatactccagtttccagcttctttttcttcttctctttttttttttgagacggagtctcgctctgtcacccaggctggagtgcagtggtgcgatctcggctcactgcaagctccgcctcccgggttcatgccattctcctgcctcagcctcctgagtagctgggactacaggtgcccgccaccacgctcggctaattttttgtatttttggtagagacggggtttcaccgtgttagccaggatggtctcgatctcctgacctcgtgatccacctgcctcggccttccaaagtgctgggattacaggcgtgagccaccgcgcccggcctcaggttctttatttgaaagttggtttctgtacctttatttgcaagttggccagcaaatgctgctgggcgcatttcagtgcccgtggggagtgactgatcagatgccttcgggatactggctgcagataaggcgtctccttcatttttgtacatgatcttacatctgctttcaaaaggagctgtgccatttccagtctccacattgtgtggggaattgatattcccttgatattaacaatagagaacataaagagttttaattttcatatgtgatagtcgcagcaaacagaatggttggctatctttccccaacactattcctgaagtgacaattctgcatatattcagtgaccatgtgtacatccttttctgtgacgtttaatttcctacgtcctgtctcttttggagggtcttccctatatttgatcctgatttagacgcagtcccagtgcctgttattctctgtttctcatgtcagcctgtccattttcctctgtcctagcttgcttctcatcttcacacagtgtctgttgtgatgtggttttgcatgtgagttccctgcttcagagtttggaaattctactgctgagctgtctcatgtgggatgttttctcccgtagcatcctaccatgccactgcctgtccacaccaccaagaagagatctgtcctgggccctgtgtccacaggtccaccgcctgtcaacaaacccgagatgagattactctgcccttcgggtcacaacgattcacctcaactgagcacctgtggacccaccaaaggacatggcagggacgttactgcctccctgctccctgttctgaagagctcccaccagacccccactctcagtgccaggctgccagccaacaggcctgacatgtcctcccatggtgctctccagcctgccatgcaggcgcttgccctgggtcctggccttaaatcccaggcagaaatcaaacatcccgacgcagatgcaaagcccagaccacagcaagtcagaaaacagtgtggccaggactccagaacccaggcaccagacaaggagcctgcccccgtccccacccagactttccagaaccccgcaaagaaagcaagattcagctccttccagacccctgcactgagaactcagctcccggatgtgggcgctgtgcagacactccagcctccccgcactgcaactggacttggatccaaagaggcacccaaggcgaccgcagagacagcagccaccaagacagcaaccctgcagcccagagtcaacctccagcccgcacccagctcacctttcctgggcccagcccagggctgccccgtcctccagcctggaccacccattcatgttccagggaggcccggcagtgtcaccttcatgagaggggacaagggacagaagagccccaggttcagaatgcctcccacatcccgtcctcctgaaaactctgcttctgctcagagccctcgcttctcaaggcagcctgaggggcagggtccccaggtctcaacgagtgtcctctatgaggaccttctggtcacttcctcctctgaggacagtgacagtgactgaggcccccaaggcaagaagacccagcttcaagcccatgcgacttggaagtggctgaaaggctgagaaggggagaggcaggaagcagccctgtacggggtcagcccttccctggcagcggtgtctgttcaaacgtggaccccagatactatcggggatcaacgaacctgcctatttacattgtataaatttaacctgtattaaaatggggctgttgaaagtatcctatagatttctttttcaattacatataattatatgagaaactgagtcaacataagcaaacaatgctccactagtgtcaatagaaagctctgaaactcatctgagggagggagcaaaccactgaaatttgagtaattctgggcaaagggcccttcaatggtagtggaaaacgtcagtgtctcctgagtcaagaatatttgactgtgaaggagagttgtagtgagaaacgattagccttggaaaatgggaaatatttttttgccttgcaagaatttttttaaaaatcagtgaattcaaatatttaagaaactgtttttcataccctatagttttttttatcagtccattcaaatatgtaataaactgttcttcataccctctacatttttccaggatataaaacaagggaaatactccatttattttatgaagctacctagactctgatttccactgtggtagagagggcatctcagctagcgcatgtgtaaagttgaggtaccaatattctcaatgttggagttattcagtggattcaataagttatgcaaagcacgtcatgaatggcacatggtaaaatatattttactattattattatcataccacaagtaaacaatagagtaacttgaagtttttaaacgaatttcacttataaggatgtattctactagccttggaacttttgttattaaatgtcattgtaaaattctgtttggttaatttctttccatatgaataaaattctctgaactatgacacgtcttactggtgttttgagttttccttttcacctcaggccaatttctttacatttcaatcatcgtgtttcatttacttgagcaaagaggactgggtgcccagagtgtcacccgcagacccatagcttctgagaaacacagaccctcaggcacagccccacccccacctgctcaatcagtagctgcagttgaataacaaccccaggtgtttcacatgtgggttaaagtgggagaagcacgaacatagactgactctcaacttggttgcacgttggaatctcctggtgagcttcccccgctggctgggtcccacccttggagagagtcatgttctaagtcccgtgtgaggctggatatagggatgggtggaccctttgaggttaagtcaaacatgggtcaaggttaggaaacactggagggagagggcgaagacaatgcttccctaacccgcctcctgaggaaactctcctgaattcagaaagatcagaaggctctgagggtgggatttcagtctcaggagagcatccctgtctccctaggacctggtccctaaaaagcagtggatggaattgtccaggctgcctcgtggatggggctggaagccatgaaatataaagagtgatctggaaactcaggttgaactcctccggcgtgctttagtgggggtgattttttaaaatgtgttataccagagtcatttcttcaacactgggcaaccaatttgctgtacaaagggtttcccagatacagaagttacactccagcacgttgtgtttagtacactctggtttgtctatgagctccgtgctgatctgaactgaagaaactgcactgttttttttttgtttgtttctttgtttttgaggagtctcgctctgtcgcccaggctggagtgcaatggcgtgatctcatctcagtgcaacctctgcttcctgagttcaagcaattctcttgcctcagcctcccaagtagttgggactacaggcgtacgccaccatgcttggctcaattttttttttttttttttttttttgtatttttagtagagatggggtttcaccatattggccaggctggtcacgaactcctgaccttaagtaatccgcccgccttggcctcccagagtgctgggattacacgcgtgagccaccacacccagccacaatatttttttttagatgttcttcaaacaaatgacttcctgcaatttgggagatgatttttttagaacagttttattgagacatcattgatgaacaaaactgcctatacggaagaagaagaacttgatgttttcatagggtatattgtggaatgattactatattccagttcattaacatacctatcacctcaacataattaccatctttgtgtggggggtgaggagatgaaatttaagatctatcctcttggaaaatttcacacataacaatatagtatttttaaacagtcattcctaaactgtacattagatctccagcaattattaatcttttttttttttttttttttttttttttttttttgagacggagtctcgctctgtcgcccagggtggagtgcagcggcgtgatctcggctcactgcaagctccgcctcccgggttcacgccattctcctgcctcagcctcccgagtagctgggactacaggcgcgcgccaccacgcccggctaattttttgtatttttagtagagacggggtttcaccgttttagccgggatggtctcgatctcctgacctcgtgatccgcccgcctcggcctcccaaagtgctgggattacaggcgtgagccaccgcgcccggcccagcaattattaatcttgcatacattactctttgtatcctttgaccaactttctcccatttctcccccctactgctcctggcaaccaccatcccactctctgattctatgagtgcgactattttgcattctatacataagtaagatcattcagtatttctctttttaaaaaataaattttaccgaatggaggttccccaaagaggaaaacacttacgttaaaacaattcaattattcattccttggctaacagctagattgaactactgatctgacttggagctgaagtgccctggaaaacatattttaaaaattgtcactcttttcttcccttgtagggtgctttaaattaagattttaaaatgttgaatattacaggtcaaatgcaattttatataaccacactgaagtggcagacagtgctaaggtgaagagctgaggatttgcatagtaaaataggaacaaggcagttataatttaatttttaaaactctcatttaaatttgcagtgctttaaacgagtattacttattcatttacatcaactttgttggttactacttagtaatcaacagagtttaggagaccataaaaatactctttctgttagaaaatacaacaaaaatataatttttagcagtttgactttcaaactgttctctgtagtgactcacatctgcaatacatctgttttgagaatcttgaaatgtgaaccctgagggttctatgaagcatttttaaacttccagttttacccatttttgactctttttaattgtatttaaacaactcttcttttttattttatttatttattttttttaggcaaggtctcactctgttacccaggctggagtgcagtgttgtaatctcagctcactgcagccttcacctccccggctcatgggatcctcccatctcagcctctccagttgctgggaccaccgacatgcgctaccacacctggctaatttttttgttttgttttgtatttttagtagagacaggtgtttcactatgttactcaggttggtcttgaactcctgagctcaagtgatctgcccaactcagcctctcaaagtgctgggattataggtgtgagccaccaagcctggcctaaacaattattcttcgcgtttaaaaattcattcacgcaagtacatgtttataattttaaaagaaaatggacagaatcctaaaacacaaacatctaaatttaacatgtatctttccaccagtatggaacagttcattcctttttcacacaaaatcagttatatgattggtgcattaactccaatctccatgtttatacagaatgctccatttgttaaacctctctgaaaagaataaaaaattcagatgattaattcacttacacttagaaactaagtcagtataccacaaatatatattgtgatcagttataatacaatatttcttggcctagggtttcaattaaacaacagaaaaaaatgaataaatactacagctaataccctgaaaaaatgcaaaaattcaaactttagcttgccaactaaaacacttgctttgagacggagtctcactcttgtcaagtgcagtggtgcaaactcggctcactgcaacctccacctccggggttcaagtgattctcctgctacagcctcccaagtagctgggactacaggcacgtgccaccactcccagctaatttttgtatttttagtagagatggggtttcaccatgttggccaggatgatcccacctcggcctcccaaagtgctgggattacaagtgtgagccaccacgcctggcttgcattttttttttctacttggcagcaaatgctgatggaattcagtgctgactacttaaagttgagtcacatcacacatttaatcagggtaataagaacatagcacacccactgtagagttacattaagacataaaaactctttgcttgaaatcaataaccgcgctgcacatgggacatctgtcaactgcttcagcacattgtttacaagtgaccagatgtccacaaggaataaaaacaacagcgatatgtctgtccatgcagattttacaaagcttctcctcttgcagacgccttagcggctcttcagggctgatttctctctgcaatgaagtctgattcaattcattttctgtagtgtctttctgagcgctcactagatctgcaacaagaacctcaagcgttttatagttgctcccagatgtttgaattctttcctccattattttcttaacgtccttgaaatcaaatcccattcgtatagcttcttgtagcataggattagggaagatggtatcactgattcttttagttagtgatggtgttttcttggtagtttgtaccagagctccctcaagtgaacgggttaaatgaatgttgtttatatattcatgtcccttctcttctagcagatatttgcaacctggataccatttagcatgctgttcccaaggatcttccttgggcttccagttggctagccctcctccacagtgaaagcactgtactttatcctcttgacctatagcataaaatccagctcttgcaagctgctctttgttaacggagtacatccatgtcccaaaagtaatgagccgggcttcataacccgtcatggatggattccttggagaacttgttgaatttgagaaattcctatcagaactcgcaacatcagattcacctcgaatattaacgttgtggcccaaaataaagaagcaattaggaaaatgtctcctgtgttctgaccaggcacgatcaccaggttcccagtttttcagttttccgccacaacagaagcactgcacttggtcatcagtgcctgtgtagtacagcccagcactggccagctctctcggggtcaagtgggcagaggctggccagttgtgaaacgactgttatctagcttcttcactatgcatggcggggctcctcgggtgtatggagtctgatctatccaccacctgtccagctctcaaaagccggtctgcacgagtctcagacggcctgtctaaagcacaacgcttttcctctcccagatggttttcaacttggtattgactatttgggacaccaggatttgcaggtttcgtggcactgtcttcaaaataaaagctgcggataaacctgcaattcggcgctgctttcttgtgtttgtcaactcctgagcccccacgttgccacctgtctaccgcttcagggcagctaaggccccccagggcgtctcctccaacgcgccgatgcccaggcaggcccaccacctgcaaagccagcaaacgtttttgatctattaatctcttctactaattcttcatcctcattgatgtctgcagacacatacgttttagatccttcgaaactgttcaaagttatcttctcttgaatataggacttgtccaccgtctcgcgccaggatagcggctccaaccgcccaggcgatcggccttgtcccaacgggagggtcccgcggagggacggtccgagccccctaccattggaaatgccaaaccctgccctaagccgggcccagccacccaggctgacgacccacgattagcaccgcgcgctctggggagccgccaaggtgcagccacttcccagagctccgaagggtcagcaagaaaagaggaagccacgaacgctcccagcctccagctggaaaccacgcggtggagtgggcgcttgcgcagtgagcacctcgtgccccacgcccgtgtctcgttcttttttgtgcttgtttcactttgcataattttagcatgatatcgtccagctccatctacgttgttgcaagtggcattttttttaaaggctgagtattagtgcactgtgttttatacacacgcgcacacacacgtgtgtaggttgcatggcactatatgtatatatagtgtgtgtgtgttgtatgtgtatctcacaaagtctttatccatttatctgttcgggcacattgaggttatttccgtatcttggttattctgtataatgctccaaaaaacatgggaattcaagatatattttggggattgtgttttaaattcctttggagattttatatatatgtgtgtgtataaatatatattttttcatataaatataattatataaattataaaattatataaattataccaaatgttataaaatatatttttataaatatatattaaataaatatatattatacatacatatatttttgggggggcagagtcttgctctgtcacccaggctggagtgcagtggcacgatctcagctcactgcaacctccacctcccgggttcaaggaattctcctgcctcagcctcaccagtagctgcgattacaggtgcctgcaccactcccagctaatttttgtattttgggtagggatggggtttctccacgctggccaggctggtctcgaactcctgacctcaagtgatctgcccgcctcggcctcccaaagtgctgggattacaggtgtgaaccaccgccccctgcctcctttggatatttacccagacatgtgattgttggatgaaatggcagttctatttttatgttttttgagatacctccatagtagtttccacaatggctataccagtttacattcccatcaacaatgtgtaaggatttcccacatcctcactgacacttatctttgtctttttgataatagccatcctatcaagtgtgaagtggtagctcattacagttttattttacattttcctgatgattagagatgctgtctctttttcatgtctgttgactatttggatttcttcttgtgagatgtgtctatttaggtcctttgcccattttaggacgagttattcatgtttttggtatcaagttgtatgagttccttatatattttggatatatgtgtgtgtgtgtgtgtgcatatatgtgtgtgcatacatatagatagataatatttttttcagttgtattgcctttctttttcttattgatttgagtacactatatatgctggaaacaagtaattccttggtttttgttctatctttcttatctttttattaatatcagctcttaaattttttataaactgaattgtcatttctccttttatacttcacattaatgcttttcgggctgtgtgagaaatcattttgttctcctttgatctattctaaaaatttcattagtcatctttacaatttaaatcagatatccattcagaattaagttgttgcattgcactaacaattgatactatgttcagttaagcctcatgacttttactggatggaaaccatcatgtttcattacggtttctactctttctctcatcaccactggagctcacatttctgtgaagccttgtggtcattctctcccttcttcctgcctactggacatgttagcaatcccacagcactacaaaacaaagctttgtgtccagaatctttaatgggccttttttctcaaagtatcaattattttcatatatatatatatatatatatatatatatatatatatatatatagacaaagttttgctcttgttgcccagactggagtgcaatggtgtggtctcggctcaccacaacctcccccacaccgcccccgaggttcaagtgattcttctgcttattcattttacaaataaaataaaataaaacaaaataatcccacctactctcctgaatagctgggattacaggcatgcgccaccatgcctggctaattttgtattttcagttgagatggggtttttccatgttggtcaggctggtctcgaactcttgacctcaggtgatccacctgccttggcttcccaaagtcctgggattacaggcatgagccactgcatccggcctattttcatattctaaagggagaagtccactgtgtttagagatattttccccatgcattccttatgtttcctacgtcttttatcagcttctgctccagactctctaaagattttgtgtaaaaaacagccttgaaagatggtggtactgtcttcataggcgttacaagatagataaattatttgaacaatataacaaagataatgccttccactgaggcaaaagttaggaagattttcttgcgatccactttaaaatagtgggggcagggtgcggtggctcacggctataatcccagcactttggaaggctgaggtgtgtggatgacttgaggccaggcgtttgagaccagcctggccaatatggtgaaatcctatctctaccaaaaatacaaaattagctgggtgtgagggcactgacctggaatcgcaattacttgggaggctgaggcaggagaatccgttgagcctgggaggcgaaggctgtagtgaattgaggtggcaccactgtactccagcctgggcgatagagcgagactctgtcgcaaaaaataaataaaataaaataatggaccgggcatggtggctcgtgcctgtaatcccagcactttgggaggccgaggcgggcagatcacaaggtcaggagatcaagaccaccctggctaattcagtgaaaccccatctctagtgataagcagaaaagagggttgaggaagggactttactggcccaaccagaaacaaactaagaacccaggactctattctctcccttggacaccctacaccaatccctgatgtcacataatgcaatttagtgtaatccgcagtgacattgattgttggtgtttaatccaagtgataatgaaaactgacttgtaatgtgcttaaggactttagctccaaaattaatctactgttcagtccaccctaggagaattatagactcaattttcagaattattaagagtgcactacaagaccaccatgcttctcaaagagataggagaggtcaagaggaatcacctaatcctgtgcagaaagggtgtctccaaatggcagttgctggaatacgaatgttttctctcatccttagtgcatgaatgcttagtggaaactgattgtctcctcctgaaaacatccatagtctcttcatactgacagattgttttccatcttctagttaaagaatcagcatttaaggaagtggtaacatacaaactgggtttcagagagcagcccttgggcacaaaagtttctaatgatgtattctctggtttaagcatagtctcatatgaatcccacagtgtactgctggaaatgaaagctgggagtcgcaaagaaaatgagtacttgaacaaaagatttctcagcaaggcaattttacttctgcagaagggtgctgcctataagcctgattgccatgagagcaccccaaacaaaggaaagcagggattcttattcctaacgcattgggcccctactgctgcgtcctatctccgttggctggagctggactgcacaatctagactgataccgattggctaaaaacttaaaactttactaaataggtaaaggcacaatggggaacaaagaaagggatggggttggttgtaggaaactaggaaaacaataacatttccaaataaggaaagaagcctgggctgcaagctgggacatgcctgggcatgtctaggcctgtccggacaggccaggaaacatatgggttaggcctcttggtttacagtacagggatataggattacttatttctttactgtgtttaccaactgcccggggcacaacaaagagttattagtagggtaaaagatttgttaatagtatgaaacatgaaggaaacttgaaagaagcttttaagtgggactatcattcttagaacttaatattattaacaaaaagggaagttttgaagaggaacttttaatttccacagtacaattttgatttgtaaaatacacaaaatttaacacgttaaagattccatttgtacaaggggcttccacttaacatgtttcagaaatcatgctttattgctattacttttacttgtatcaattatgaatatagagataagtatataatttgaaattactaacattaggtttctaccttgtatgattttatcacatattggtgtttcatttcccatagtttggagcaagacatagtgttcagtgatttctgtgataggttccaatttatttctggcataaaagcaaaatcttatgtctgctgccatctcaagatagaggcaattgtgcattctttaaatatgatttgtcatggagcagttcctagagaattataaggtcattctgcgtctatgttatgttaagatatctcaattttatttgaagtttgtattggcatattctataaatctttatccatgaatgtaaacttgttacaaagttacaaaataaaataacaccaatctacaataagaggacaggacttaaaatgactctatatacatctgcattacttgaagaagacagttaaattctcccttgcatagagtttaactccaccactctttaccaaccctgccaaggtcaagccccctctttgctctaaaattttggattttgacaaatcagtagctttatccatctacgtgttccttagctttccagtgaaagtaatagtcctgcctgttctgtgatctgcctgccttggcctcccaaagtgctgggattacaggcgtgagccaccgcgcccggcccgagtgtacctttttgagtcattttccttgagtagccctcatgtttttgacatcatttgtccactcctgttccaaagcaccctttcaaggattgttgtataagaaatcattctaagagatgttgacactgtcatcattgggggtaaaagacagacatgaccatgtaacaaagattctgcctcctgcttgaaggccctacatatttcatgacagtcttgatgatggtgggatgctgagagaaaaatgattttctggaaaaggaaaggacgggttgagggataagagaaggcacgtggtcatggagtacatgtgttcatcaagctggaaacaaggaggagtaggaagcctccctgctcttccatgctagtgaagctcatgtaagggaagaaggatttaaacaagcaactgaatgtgctttgcttactattcattcttttcctggcagaacagtgaagattcaagggtgacttgaaagcattctagcttccgtatttgagccttaagcagccagcaggcaggtggcactgggagggtcgagctttgctgctgccttccttaccagcgcagacactctcctgctctgcaccccagtttcttcctctgtccctatcctgacttcgtcaacattaaagaagaaactaaatattcttggaatttgttgtaagtggggaactcaaacttctacagctctgctggatatgcatgcccctgtttccattctggcctctgtggtgcattgcagggagggtgggctaggtgcgggggaggctgaaagtccccggggataagcatgggtcatgggtgcacgcgtgggcagaaaaagaaaggctccgtatctggccctccctggttgctgaacgtacaagcagaagaaggaagcttcgcagaacttagggtgaagaaacaaaagatgaaacctccctctaccctggcaggccccatgctcaccccatctacacccgcgcatttcccacaggctgcctgggatcctgtggtgcagcctgctagagtgtaatttctctatcagggaaactgtttgtacagcaaattgggtggccggagttgaagagatggctctcacgtaacgtatatttaaaaattaccttactaaagcacgctggaggagttcaacctgagcttccagatcactctttatatttcatggcttccgcccccatccaagaggcagcctggagacttccatccactgctttttagggaccaggtcctagagagacagggacgatctcctgagactgaaatcccaccctcagagccttctgatctttctggattcaggagagtttcctcccaaggtgaaaacgggaggaggcaggttagggaagcattgtcttcgccctctccctccagtgtttcctaaccttgacccatgtttgacttaacctcaaagggtccacccatccctatatccagcctcacacgggacttagaacatgactctctccaagggtgggacccagccagcgggggaagctcaccaggagattccaacgtgcaaccaagttgagagtcagtctatgtttgtgcttctcccactttaacccacatgtgaaacacctggggttgctatataagctgcagctactgattgagcaggtgggggtggggctgtgcctgagggtctgtgtttctcagaagctacgggtctgcaggtgacactctgggcacccagtcctctttgctcaagtaaatgaaacacgatgattgaaatgtaaagaaattggcctgaggtgaaaaggaaaactcaaaacacctgtaaaacgtgtcatagttcagagaattttattcatatggaaagaaattaaccaagcagaattttacaatgacttttaataacaaaagttccaaggctaatagagtacatcattacaaatgaaattcattcacaaacttgaatttactctattgtttacttgtggtatgataataataatagtaagatatattttaccatgtgccattcatgacgtgctttgcataacttattgaatccactgaataactccaacactgagaatattggtacctcaactttacacatgcgctagctgagatgccctctctaccacagtggaaatcagagtctaggtagcttcataaaataaatggagtatttcccttgtttgatgtcctggaaaaatgtataccatataaaaaagaacagtttcttaaatgtttgaattcaatgatttaaaaaaaacacattcttccaagaaaaaaaaatttcccattttccaaggctaagcgtttctcactacaactctccttcacagtcaaatattcttgagtcaggagacactgacgttttccactaccatcaaagggccctttgcccagaattactcaaatttcagtggtttgctccctccctagatgagtttcagagcttttactagtggagcattgtttgcttatgttgactcagtttctcatataattgtatgtaattgaaaaagaaatctataggacactttcaacagccccattttaatacaggttaaatttacacaatgtaaataggcaggttcgttgatccccgatagtatctggggtccacgtttgaacagacaccgctgccagggaggggctgaccccgcacagggctgcttcctgcctctccccttctcagcctttcagccacttccaagtcgcatgggcttgaagctgggtcttcttgccttgggggcctcagtcactgtcactgtcctcagaggaggaagtgacaagaaggtcctcatagaggacactcgttgagacctggggaccccgcccctcaggctgccttgagaagcgagggctctgagcagaagcagagttttcaggaggacgggatgtgggaggcgttctgaacctggggctcttctgtcccttgtcccctctcatgaaggtgacactgccgggcctccctggaacatgaatgggtggtccaggctggaggacggggcagccctgggctgggcccaggaaaggtgagctgggtgcgggctggaggttgactctgggctgcagggttgctgtcttggtggctgctgtctgtgcagtcgcctcgggtgcctgtttggatccaagtccagttgcagtgcggggaggctggagtgtctgcacagcgcccacatccgggagctgagttctcagtgcaggggtctggaaggagctgaatcttgctttctttgcggggttctggaaagtctgggtggggacggggccaggctccttgtctggtgcctgggttctggagtcctggccacactgttttctgacttgctgtggtctgggctttgcatctgcaacgggatgtttgatttctgcctgggatttaaggccaggacccagggcaagcgcctgcatggcaggctggagagcaccatgggaggacatgtcaggcctgttggctggcagcctggcactgagagtgggggtctggtgggagctcttcagaacagggagcagggaggcagtaacgtccccgccatgtcccttggtgggtccacaggtgctcagttgaggtcaatcgttgtgacccgaagggcagagtaatctcatctcgggtttgttgacaggcggtggacctgtggacacagggcccaggacagatctcttcttggtggtgtggacaggcagtggcatggtaggatgctacgggagaaaacatcccacatgagacagctcagcagtagaatttccaaactctgaagcagggaactcacatgcaaaaccacatcacaacagacactgtgtgaagatgagaagcaagctaggacagaggaaaatggacaggctgacatgagaaacagagaataacaggcactgggactgcgtctaaatcaggatcaaatatagggaagaccctccaaaagagacaggacgtaggaaattaaacgtcacagaaaaggatgtacacatggtcactgaatatatgcagaattgtcacttcaggaatagtgttggggaaagatagccaaccattctgtttgctgcgactatcacatatgaaaattaaaaccgtctttatgttctctattgttaatatcaagggaatatcaattccccaaacaacgtggagactggaaatgtcacagctccttttgaaagcagttgtaagatcatgcataaaaatgaaggagacgccttatctgcagccagtatcccgaaggcatctgatcagtcactccccacgggcactgaaatgcgcccagcagcatttgctggccaacttgcaaataaaggtacagaaaccaatgttttaacaaagaagctggaaactggagtatgcaaagtcctcaggtagcgtagttctcctgcagggcagcctaggtcttaacatgacccccacccatgaagggcacagaagtgaaggaatcaggggacctagaggagaaacagagcaggggcagggggagactcaccctcaggaatgaacaggcttccgctggctccttccaggcttcctgcgttttctcttggggagttctgggaaatgtctgcttcggagctctgttctgctgctgctggggactgcagaagaaatcacgttcactgtctggacctgcctgaccctccttgtccacaccagtgactgggaaccaagcaccctcccggaacccagccctagcccttgctttgggtgagggaggcgttcaggcctctgtgaactctgccaagacagccccttctctcatctcagaagcagccccacttccaggaagctccgccccccacccccaccatggccccaggttctctaagttcattcaggccctggaactgctctgcctgcctcgggtaacatccccaggtctcccacagcccctgccctctagagactctcagcgctggaataagctcggagtgcggaccctggaaggcaggggcctccgtccacctccatttggagctttccttgtgtgcttagagaaggctgcacagaaagactaggggagacaccagctcctgaggcgccgacctcacggatcttccttgaccctgcaaaatccttaccttggacttcgctccttttctctgtcattcgtcgtaaagggccctggagtcgtaaagggtagctgggcctttgctggtttcaggttctccttctccttgtgtgagcccaggacctgcagaggaagggccccactccacctcttaatggggcaggtcttgttcctggctgagtgcccaaaggccccgcagttcttgcatttcacctgcaggtggaggaggacacagagcagtgagtcaacagcaatcacaggcacctgcaaggttcacacaaggcctgggttttggagatggattattttaggagggggacatacgcccatgggctgttggttgccaggaaattcaagatattatcgtcctccccagagcccgtttaacagggatcccaggaggaaggacgcttgtgtctgagagtgaagataatgaaccggtgttgaggactcggcaaacaccaggctggacatgacactggacagagaatgaggctgctcctcagagactccgaatgggccaatctgccaagacaggaggctgaccgatgtggtcagactgagaccagtgggaactcttaagtcataatcacgagtcccatgttcaagcccactctctggtgtccataggttaccaacattttcaagcccccactgaccctggattcctcctgctctgctgggagagtcgtctgccccatgggtctcctctgctgctcctgtgggttcttggctccggggggcccctgagcctgatgatggatgggatgaccggccatctgtggcaggtccttgaacttctgatcattcttcttcattaagtggttgttggatttcctagtcataagaaaaagagaaaacattacacagacaccagacgaaagtccctcctacccctgtctacccaagtagggatggagggatgcactggccactgagtcacgcccactgtaacttggtcctctctgaacccaggtcccagttgtgctattttgtgactctctcccatcctgacctactcccagaacaggacacagattttataaaccaaaggctgcttgatttctagagggcgaagtgagatttgcagccttgcataaaagttttctgggctctcggtttgtgtgcagtcagtgcctcagagctgaaaccctctgacaatatttatcaaagccaagacatgaacagccaacaactactgatttttttccagcaagttccagaaaaccaactattttcatagaatagcttctcactcagaaaaccaaccagaagctcaaagctttgcaaagttttcatattcaacctatggacactcgtgacgtttcacgtgagacccctgtgaccacacgccactcttcacacagaggcaggcacaaagccaagtgaggaccagccctctgaggatcctgcgacgctgacacatatgtgcgtgttcacgccaggcttcgcacacatcactggccgtgtcatggggggacacgcaagacggaagcctccaggcgtgttcagcagaaacctcgagcccacactgtgcttcagagtctcccatgccgtccctaccttactccctaatacttatcttacctctcctcttggtatcaaggtctctgtgaaattgtgggtggctggtccactgaagcctggcattttttattcgagacacagcgggcggtcggatcctctcctggcttcagaggaaatcgcagaagaacctccacagaggcgagaacaacccatttctctgtcatcaagtcaatctaatgcagagaaaggagaatggagaggcaacctgagttctgcaggcaggaggaagccttggcagaggagaggaggaactcccatcttcctgagattttaaagggaatgctgggcaggctcacatttcattgttttttttttctttttttttaaagaagtcgttatgtgaaaaagatacttgcacacatatgtttacagcagcacaattcgcaattgcaaaaatatggaaccagcccaaatgcccattaatcaatgagtggataaagggactatggtgtgtgtgtatctatctatctatctatctatctatctatctatctatctatctatctatctatctatctatctgatggaatactactcagccataaaaggaagaaattaatggccttcgcagcaacctggatgggattggggactattattctctgtgaataagtcacgaatgcaaaaccaaacaccttatgttctcactcatgtgcgggagctaagctatgaggatgcaaaggcaatctcacagttctttactccagagctggtgaggagttggctgatgaccttcaaatggcaccaagagtgacagcccagggtattgggaagtgctgctgttcccaggtgggaactaaggggccatggcagtggcattttcccatgtccctttgaggaattacgtatcgattttaatgggtcagtgcccgtgtatggagggtgtgaaactctgaatatgagccggtcatggacggggagcctgcttcagccttcccccaggcttggactccacccattccacctgcctcccaggtgaccccgcagctcccgtactcacatctctttgtgggatcccgcactgctttaagaactgcttcccctgttccatggagagagtgttggggtccatcactgctggtcctgcctgagggattctctttccctgtggagggtagaaaatgagacgctgattccttcctatccctggactctcccaggcacaggatgcagtcagccccatctctctgctgtgcccaccgtgtccctaggagtaaactcacacatcctgtcattcaaactacagggacacatccttcctctgccagtgacatgacaccaatgtgaatgagaaaagcaggtgatccattaaaagaattgttcactggacttagcgtgtttgatatgtatgcaatgcaggtccctcctctggagactctcatagtataccatcaaacatccggaaaaattgatcgtggaattggcctcaaagaaaattcaatatattagaaaactgaatattttaatcatctgtacaccctccttgtcaaaactagatatacctacattttataagttctttctaatattaaggacgttttaaactatgaagcacattccttgaactttctgaaatcagactccttgagatcaaacaagatattcaagggaaaccatcaagtgctaagaaaatacaaaataaagcacttttatgtccaaactgatgagcagtgcaaaatgtgggttcaggggaaatgtctttggctaaatgaccacagtgctagggaaacaggagcataggagagtgagggcgacaccatttagaaatcaactccatctgaaaactagtgaggcacagtcctggccagtcaccaccctggtcctaagacgtttgtggctgaggaagcagcttagcaatgcctggatggacagactcctatgaaagcaaaatgtccagatgccccatatccaaagcaatagataccttcaagataatgatagctatgcttcctgagctacacactagaatgtcaaggagagttttctttaaatcaacagaatactaaacattgtcatgctgtcagtccaccacatgtagacacagcttagttgaatcttcacgtggacaaaacccctatatcagaaaaacttaaagacagtgcattcttctggttgcgttctgaggtcaccgtactctgtaatatagtagctgtcaataaactctcttcacactgctctctgcaatttgcctggaattccttcctgcatgagatccaagaaccctccctcagggtctggatcgggcctcttttttttccacaacaacatgattgaaaaaagataaaatctgggggaagcactcaggcctatggagacagcttacagacagaacaacgaaagattgcaaaagaaataaaaagatggaaatggtaaatcaaacaataaattggagctaatgaaaaaataaatagaatacagcaggaaaacgtactctttctttgagagcagtagtaggatacattaccatgggttaccacagaaagataataaaatttatcttaatagatcatatcagggaaaagaaaaggcaataatgccatgaaaatagaaaaaaaatgatcaaggaatgctatctggagcaaacgcacttgagaaatctagaataaagtgcgcgttccttttcaaaatcaaaattgagaagtgaagaagcatttttaactacatatttaagtaggatcattctttacaccatcattatagactaggcactcacagcttaagtcttgcttgccttaatctttgggtagaggctcagggccctgaatttatactagctcctagcaaaggtcaatgagtatactggaataaaagataagtgaagaaatctcttatctaatagcttcttcgtcaaaggcaccaggtctccataactgatcatccagcacccacacaattcagggtgctgggtgatcattcttagcaaatgttgacctttatgtaatcattaggatttctgaaatattttttgaatctggctatgtcctaagaaatactgttaaatggctgggcgcagtggctcacgcctgtaatcccagccactccggaggctgaggcgtgagaatcacttgaaccgggaaggcagaggttgcagtgagccgagattgtgccactgcactccagcctgggtgacagagcgagactctgtctcaaaaggaaaaaagaaatactgttaaacaattaagtattctttacctcaacatctaaaaccgcacgctaaagagttttcccactattctatttctcccattgggataaatgaacgcccgaaatagtaatggactaacctgttcttcttgcctaccagcagcaactcaggtaagtggacccagggcaaacttcactccttacgctggggcttccacagtgaaggaaacaaagctcactgaggggaaggtcccttctgctggcatttatactgctccagagccccgcagccactccccctggctaacctaatcgcgatatgatctaattacctctccctctcttgatttatttggtgatcctgttcctagcacttttgttttatcacagatgtatacatctaaaacaaataatttgctgtatgctcatctcataaaattttaaagtttaacatagaagcatatggtttgaacaacacaaactactttctgcatgtttcaaatattgaggcatacatcaacagcctggctgcctcattctgcgttttgcaccgaggtgggcagctcggtctccccatggcaggaagctcagtggcaatgtgtactggagattctggcctttgtggggccaaagataagtggtctaagaacagcctggttcactatgtgtcgggggaatagatgaggttgtgctgtatggccgtaggggatgggtcacccaaagtctcagacggggagaactgtaacaagccaacagctcagtttcagcgacagctcctggaaagtcagtggctcttgctttttatccctgacgggaacaggaaggcaaggaggcctccagggtgtggacaggagctcagcaactgagtgggattaagagatcctgaggtctagatagcacctggttattgagggtggagtgtagactcacctctctgctagatgagggggctgagtcaggacgtgggagttgatatagtttggatgtgtgtcccctaatctcctgttgaactgtcatccccagtgttagacctggggcctggtgggagatgattggatcgtggcggcggttttctcatgaatggtttagcctcctcccctgtggttgtgtcctttccagagtgagtgagttctcctgagatctggtcatttaacggtgtccagcagctgcctcctcactctcttgtccctgcttttgccatgtgaaatgtctaatccctctttgccttccaccatgagtaaaagcttcctgaggcctctcagaagcaaaagctgccatgcttcctgtgcagcctgccgaactgtgagccagttaatcctcttttctttataaatgacccagcctccggtatttctttatagcagtgcaagaacaggctgatacaggagtggtcccaagaattctcacagcgatatcaggatgtggggtccctctatcccattcgggtgggtttctcacccacatgaagcagaactgctgaaacttgtttcctgacacatttttatttgcattaataatttacctcccccacatttatactaaaaatccacatacaatgattcagttagacgggaggaataattatttgagatacggtatagcattgtgactatggttaacaataaggtatattattaacatgcaaaattagaaagagagtgaatttcaattgtcctcaccaaaaaagtatgtcaggaattgagatattaatttgattgacttaaaatttccacagcatatacatctatcaaattagtgcaatacaccccataaatatatacaattattatttatcaattaaatttgttttttaaattcacacacaaatgaaaatggaaaaatggccagtagctgatttctgcacccaattctttcacccccaatcatacactacatactgtgtgaccctacgcaaaaataaaatctcatgtctagcactatcaattacgggaaaaagagtatttttttaaacaaagatgtttccaattacagtggattgttttttattgcaaatatttcatagattcaaaaaggattttaaggcgtctcttattaagtatatttaatttacttttaattgacaaatagttcttatgcatactcacgggtccgtggcgtccttaggataggtttaatgcgtggtgattaggttagggtgattaacatgtccatcatctcaagcctgcgtcatgtctctgtgttggggactttccctctcctccctctagctactggaaaccctgcgttattggtaacgatagccatcctgcagtgccatggggcacaacacggtgggttcctaggcgcgctccccagcctgggccctctggaggcgtctcccggcagtactgagccacgtggcgtggactgcacggggtcggtgacttcaaaagccccacttagatcctctgcacttaccccctgcagagcaccgacagccctgctctggaagcgcgggtctgcttagatgtcctaagcaacttcttgcaccaggcgccgccaatgaggagttcggtggatttctaaccaagtcccatttcaccgagagcggagtcccgcggggaccaggaggttccttctcgctccgggagagggcgctcctgcccggcgtttgtagcggcggcttcctggctgcttcccagcgtggatttgcacccggtcgatttcctgcgggtgggcggtgcatgaccctggttggacgccctgtttacccctcttctccttgggctggaactcccagagctggaggcagtgcagccacggctgcgaactcaacaccagcacattcttagaaatggaaaaccctttctttacctctgatgttcatacctgagagtttaaaaaatacttacaagttttattccaggtggcgggctcacttgaaaagcaaagatagatgtagataatcttttgtgattttatgcattcatatgtgaaacgcatttagaatgatatccagtatgcaataaatgttaaaaatttttgtctctttcactccagtttgaaaccgtcattattttttttaatttcttgactccaaagtcatgcattgaatatttcctcagcacttcagctcctggggctggagaagcacactggaaaatgagtgagtgtgctttcagcgatatccgcatttctagaacagcatttatttttgcatatgcatgtaggacacagatacacagggcgggtttggggcgggacctcgtgcggtgcaggcgctgtgggaagcgttgccctaacggctggtctccagggctgcaggtctgggcctgtgtctggcacccacgtgcgggtgtgcgcgagaagcgccgttaaagacagagctcatcctgttagctgtccctctcatccccgcccctgcaacctgagtttcccagattccttacgtcccgcaatgtccgagttgatgcgctgaaagagcaaagagatcaaaaaaagaaaggtgggagaaccgcgccacacattggttgggatatttaggttttacagccgttggcgaaggcaatttagcaattatccaaccatagaagtaacgtgcattcggccgggcacgatggctcacgcctgtaatcccagcagttcgggaggccggagtgggcggatcacgaggtcaggagttcgaggccagcctggccaacatggtgaaaccccatgtctactaaaaacacaaaaatgaccggctgcggtggctctcgcccgtaatcccaacactttgggaggccaaggcaggcggatcaggaggtcaggaattcaagaccagcatgaccaacatggtgaaaccccgcctctactaaaaaatacaaaaattagccaggcgtggtggtgcgcacctgtaatcccagctactcaggaggctgaggcagaagaatcgcttgaacccaggaggcggaagttgcagtgagcagaggtcgccccattgtactccagcctgggcgacagagcgagactctgtcccaaaaacaaaaacaaacaaaaaaacatacacacaaaaattagctgggcatggtggtgggcgcctgtagtccctgctactcaggaggctgaggctgatgaatcacttgaaccctagaggcggaggttgcagtgagccgagattgtgccactgcactccagcctgagcgacagagcaagactccgtctaaaaaaaaaaaaagaaagaaaagaaagaaagaaacaacatgcaatcacggtggagccgcagtacacgtgtcagaaccacccaataatctgcatgttcgcacatcagtgtgttcagccacctacactcccggcagcgtttcacagcaggagacagacaagcacatgcgactctgtacaggggtaaacaggagcgattcagtaacatgcttcattcatacgcaccaggaaataggatgcagtgtttccgagaaggaggtatagaaacatcttccacactcatcactgactgggtgaagcaacacgaacaatgactccaacatgaacacatttatatgaattttgaaggaagacaaaatgccttaatcatgtatatgtgtatgtgtatatacaaatagacctatgtatatgtccatctatgcaaacatatacgtgtgtctacgtagagatttgtctatatttgtatctgtgtctatctctatagatctatgtctctgtatctctacatttagatatagatatgaagatatagatctatatctgtctatatataagatctttgtacatgtatctatatagagagatgtatttatttatacagagatatcaatatataaaggaggatacacctcaaactggtaacaatcgttatgcctgggatcagccttgtatctttgctggggtatttatagctcactttatttaactgtttaaacattttatcattaaattggatcctgtacatatccgtttcccatgactccaccattacacaacgtcagcgccttacaacagcacccatttattttctccccataggtcagaagcccacagtgcttggctgtgtcctccactcagggtctcacaaggaccgaatcccggggtcagctgcctgggcttttctctccaagctcgggggagaatctgcttccacgatcatttaggcggctgacaaatctccttttcttctcatgatttctacctgcctatcctcttcagagccagcagcagcctgtgaaatccccctcttccctctaagccgtgacttcctcttctgcggtgtctctaacttctttgtctgctttaagagctcacttgattacgttagactcctggatcatccaggataatctcccgagttcatttcagctgattgttaattacatccacaaagtctcttttgcctacgtggaacttaacataaccacacgataacatcagggattggagaaccaaccaatgcatttttttatggtaaaatattattgaaaaaaatattctcaaagtatcagcaaaatgattaccactctttatctcttgtgatggtttctggtgagagaaaagcaaggggaaagaatactagaatgttgaattctgtgttttattttcttcataaagcatgtgctatgttttggaaataccacagtaagtaaaaggagctcatcctttcgaacttgggacacaaaataaactcctttcattccatgaccctggcacctcttgtccccacagcatctagtatcccccatatgcttagctccttgcacgcttttcccctgtgcactcttaaaacctgcagcgtactctactgtctgaaaattaacctccttgtgcctttaagcctctgtgctctgtctcctgttcagtatcagttccctgcatttacaggcactctgtctcaacggcatcctttccatgagcccgcagatttaccctatgtcacaaacccgtgcaatgtcacactctctgtcacacactcatgcaatgtcagaccctctgtcacacacccaggcaatgtcgaccccaattctccagcttttctacttaatgccttgggccaaattagcaacgtgcacatcattttatacgttgcacatggtgacgtcatcatcatgagtggtgcaaagtggaaagaagtatacaggctgaatcacaatagagccatgaccgccgctattctccagataggaacctggtgtcaagatacaaatacgtgtgctgacgctgcgagtgtggtgtttaaaggtgagtgggactgtgtgagtctgtgtgagtgcagggcatagtgagtgtgtttgaatatgactgtgggtttgtggtgggtgtgtggatgggtgtgagcctgtggtggaatgtgtatgtgagggcgagtgtctagctgtgtatgtacgtgatgttcctttgatttgtgctgctgtgcatgtacgtatgtgtttgcatctgtgtgtgtacatctgtatgtgaatatatgtgtgtgtgtgtattatagaggttgttcatcttatggctctaatccctgatgtggaaattgagaagcattgaatgccagacaagaataaaatggactcttctttgtaggaaaaaagaaagcattaatttgagctcatatttcatatttcttattttattacaaaaacaaccagtgatcattgctgaaaacttagcaaaaaacaagtgcagaggactgtggcaaccatccaatgctcttgaatcgagtaagcagcatttgcttccctggattgatcaagaagtgactttttagccacctgatccacatcatctagattccaaattaattggcattgagccgttggcatcctgtttgtccttttacttgtatccctttgaaaatccttctcaggccctctgtctgggttcatttctctgcacataacctaatgatgctgcagctgagtggcgtgaagattaggaaagagctcgctttggggcagaacctcccagcaaagcagagtatccggggacactcgtccctcactgtgagtgtgtcacaggtcagaactcagcgtttcctgctccctccatgtaagactgtgtctctccagggaatggagacgaaagagcctctcccaaacactcctcatagtctctgaagagatgctggccagaaacttgtcattgcttttggtgattagcaattgggaagaaaagttgttctgaaacgttctcagctccccaaggctgcactgtcgttgccactgcaggtgaaaagataattgcagttctgaggggaggtgaggtcacagaaccacaaaaccatatctcaaggtctggctgcttccctcccacacgatcctggctgtggcaaccttcgcactgagcccaccgtcttagcagcaagatggagctggggagaaagtctctttcggtctgtagggaagggtgcttcccaggagccagggtaagttatcctattataataagaaattgttctagattgaaaactggtctagttcccaagtcacagaaaaaagaggaatagttcggagccatgagctgagctagcaaaccgaaatggggtcctagccccacaccaatccctggggggtcctgacgtgatttaggagaatccacactgacccgcattgttggtgtttcacccaatcatagtgaaacttgactacgttcttaaggattaacattcttaaatcaatctgtcgtaataatgaaagctggttgcattcttaaggactgtggtactaaaatcaatctgctgttccgcctacccaacaggaatcatagactaaaatttcaggattgctgaggacgtgactataatatcaccatgcttgtaatgagtagactgactctacaggagtcatgtaattccttacacaaacagtgtatctaaatggtagttgctggaacgaaaatgttttctctaattctgagagtgtgcagggcttaatgggagcattaattgtgtctccactgaaaaccaccatagtctgttgattatggtgagactgtctttcctcttgatgttaaggaggcagaatttaaggaaaaggtaactttataataacgagctaaagagagcagctgtcagactcaaatgtgtcctctaatgtgttctctgcttcaaatagattctaacatcacccaaactctctaatttctgtttatcaactatataacacacatccattagagtttccaattttcatgtttgtcacactttaatttaattatgcaaatattgtcctaaggataataatttctttaactcagttactaatggctctagatatgtcatctaagatttgtaagaatttggttattaccgtacactattttatcccatattggtgtttcatgtcctattgttttgggtaagacatgattgtggtaggtgcctttatgcctttgtccttggcacaaaagcaaatgctcacaatgttttttactctctttccattctaatattgatccgtgcttgcagtcattaaatccaatttgttatggcacaggtttctatagtgttaaactgtaattcattcatctacattttttaagatctctaaacctttatttattcagatattgacaaatagaataaatttttgcacatgatataaaatcattacaatatacagtaacctactacaagactaaaatataatgacaaggaataaaaacaaaggtctctgtatgtgtgtgtcttattcaaagaacacagctatctagctttgttagtaaactataatggctaaatgcactctctgtgcaaaaaaacaaggcaggttcaagttcgtgcttgcctgtaagtagggtggaaatgtcactagccacttcacctctctgtgtctatgtccttctcatatttacaatgaaagtaatagtaatgcctgcctcataggtttgtgaaaaaagaagttgccgcacgtatgatctgcacagcagtgattcccacatgggaagtgctctttaaaggttacgcattcaactctcaaaagcctcttaagagaagagtgactttaagtatttctaagggcagagcaatgggaggtggagaatgctgggttgcaggtgacactataaacgtagctcatgcctcctatttccatgcaggacctcccagccctgaagacaaacatcagtgacagacatcagtggcagaatggcctcccggtatgtggcagtgggaatgatcttcttatcacagaccgtggtgggagtcctggggagcttctctcttcttctccattatctctccctttactgcactgggtacaggttaaggtccacagatttgattgttaagcacctgattgtagccaacttcttagctctccgctgtaaaggagtcccccagacaatggcagcttttggggttagatattttcttaatgctcttgggtgcaaacttgttttctatctccatagagtgggcaggggagtgtccattggcaccacctgcctcttgagtgtcttccaggtgatcacggtcagctccaggaaatccaggtgggaaaacttaaagagaaagcccccaagcatgttggcttttctgttctcctgtgctggatcgtgtgcatgttggtaaacatcatctttcccatgtatgtgactggcaaatggaactacacaaacatcacagtgaacgaggatttgggatactgttctgggggaggcaacaacaaaatcgcacagacactgcgtgcaatgttgttatcattccctgatgtgttgtgtctggggctcatgctctgggtcagcagctccatggtttgcatcctgcacaggcacaagcagcgggtccagcacattgataggagcgatctctcccccagagcctccccagagaacagagctacgcagagcatcctcatcctggtgagcacctttgtgtcttcttacactctctcctgccttttccaagtttgatggctcttttggataatcccaatagtttactggtgaacacttcagccttaatgagtgtatgtttcccaactctcagtccctttgttctcatgagctgtgaccccagtgtatacaggctttgctttgcttggaaaagatgacaagatcccctaaactgatcataaacatgtgaaaacatgtaagttgtatatatttgctcattgtttaattgatgattccctcttccctgcagtaatgtacacatgattatgaacctgtcacaatcatgagaaggtgatgaacaagacagggtgaacttccatcccaatggtaaacaatatctagtaagaacaattataaatgaaacgatgaaattattatgtaaatactcatattattaaagctttattaatacctgcagtagagtcattagaggtccatgcaatttaaattaggtcatgaatcatgatgaaattattatgtaaatactcattattacagttttattaatgtctgcagtggagtcgttagacatctatgcaattaaaaaaaattaggtcctgaatcaaactggaaattatggggatctttttgagtgtgcaaccttcagtctgatataataaatctatgcagaaattaagtaagcatgagattgctgaagaaagttacatggggaagtagcaatgtgtgaggtgatcattcaagaaactgaagaaggaaatgttctccggtagtgatgacgtagcatggagataaggttttggtcaataccagaactggggaccaagttataaaatcagacagatagtagtcatttaaaatatgattatatggaaggaaattagtatagcatatttaaatcacttacatatataaacagttagactgatcgacagtaagacaaaggagagtacaaaaaatatatttatgccaaaataaaaacatcaggtgagtgctgtctattaaaaaaccaatgctggctgggtgcagtggctcatgcctgtagtcccaggactgtgggaggccaaggcagaaggatggctcgagctcaggagtttgagactagcctgggcaatatgtaggaacctcgtctctactgaaaatacaaaaaaaaaaaaaaaaattagccaggcgtgttagcacatgcctgtagtcccaggcacttgtgaggctgagatgagaagatcacttgagcccaggaagtagaggctgcagtgagctgtgatcacaccactgcactccagcctgggctaagggagtgataccctgtctcacaaaaaaaagaaaaaaaaagcagatgttcaggatctaaatcagtagagggtaatttttttttctttatcatgtgacgatgccaattgatcatgttagaaagaaagagattttggggtgggtgttctcatatccctaaggcgagcaagcaagcacaaccactcattttattaaaatttacttgaaataacagagaactaaacaaacaaaagaattaacaatgaaatatcttataaatacaagcatttattttaaatagatgacaacttatcttagatcacaaaaaagaatagaaacaaagaaaaactgaaaaacatctttacacttgaatttcataccagccacttttgacttatgtgctctccatctatatatttctgtattgcctcactctttttttttttttttttttttttgagacggagtctcgctctgtcgcccaggctggagtgcagtggcgggacctcggctcactgcaagctccgcctcccgggttcacgccattctcctgcctcagcctcccaagtagctgggactacaggcgcccgccactatgcccggctaattttttgtatttttagtagagacggggtttcaccgttttagccgggatggtctcgatctcctgacctcgtgatccgcccgcctcggcctcccaaagtgctgggattacaggcgtgagccaccgcgcccggccttgcctcactcttaacagcttgctgtaggtattactgtttttgatagacttggcccttgggtttcatgctagagttatgagtggactgcaaggcacaattacagtattagagtattctgggcttccttttatacttcattttaccagtgggtgttgtgccttcaatttttgtgtgtgtgccaattggtgtttagttcatgttgaataactccttgtagcatttcttgtccgctggatctgatggtgatgaatgctgtcaacttttgtttgtccgggaaagacagtttcctcttcctatttgaagggtagctttgctgtataatatttttggatggcagcttttttttttctttcagcactttgaaaatgttgccccacttcctcttggtctgtacagtttttgttgaaaagtctgttgtgagataatttggagcgcccttgagtgttatttgcctcttttctcttgcaggatacttcttacataaataagaatagtgactggtctgcagaaatcttagatttaaaaacctcttgaatctaggaaaccaaatcaaggcagatttcagactttgtctgcagtacccaaaaacaatttaaatataatatcacggtcaaaaccttggtaatacaatcaatgttttaaattctatcctgttacaaagaaagcagattcttattgaacttatgcaaacaactctattgccataaaataaaaatacacatgaagagcttcaaattttaggcagatcaaatagggatcacatttccacctctgttcataaaagtatatattaccaaattgctgtaaactttaggtagcttaatagagaacgttttctgaaatctggaaaacaaatcttttaggttaaataaccaaaactgtatccaaaaagtcattaaaatatgatcttcataagttattaagtctcccgtaattattttttgttgtatttgatctcaattagcagtttcatgaagccattagttcccttattagagttccgaaaatttttacttagtctattgtttttaaggttatcagaaacctgtcttcaggagtatttgtcagagtcttctccatgaatccgattgcaaatgccattagagaagaattacaacagtggatggcaaagacttagactagctacaattaagaatctaggctgggcacggtggctcatgcctgtaatcccagaactctgggaggccgaggcgggcggatcacctgaggtcgggagtgggacaccagcctgaccaacatggagaaaccccctctctactaaaaatacaaaattagccgagtgtgctggcacatgcctgtaatcccagctactcgggaggctgaggcagaatcacgtgaacacgggaggcagaggttgccgtgagccgagatagcgccattgcactccagcctgggcaacacaagcgaaactctgtctcaaaaaaaaaaaaaaaaaaaaaaaaaagaatctgatgatatttagccatcgatgaggaaatttagttatctctatttcatgcatcatggattcactagaatcatgaattataagttgacgccaagaccattagacttctataaattttacataaattttggaacactcacatcaataataaattattcacttgaccagagtgacaattaaaatatttaaaaaataaatacagaaaattacatggatgttaaatttttaaaaatacccttaactttatttaaagctcaacattgctgagtaattaaagcataatgacgataacaggaagtgcacaggaaatcatcttgatgaaacataacatgtttgttctctaggccagttaccaaaaggtaaagaaaaacttcctgcaatgtgattgcttctccctatgggaagcctgttcagataacctggaatttgaacctgaagaaaaggtacttaaattcaattagatactggaagagtgtgtgtccaaagttataagcatacaccctattacagaataagtaaacaaaacaactagtaccttgggcaggggagcatgtggcttttagaaaaagtaaaattatgtgaaattttctggttacatggaaaaaactcagacacatcaagaaaaaccaagaacatagaatcaagttacactggaggaagataaatattttcagtgtcaggtcaatagcagagtcagaactgaaaaaaaaaaaaatgctgtagaagcagatgaaaagttgagagagagagttatttatttcagccaagcaaaaagttgtaccccctcaagaagaaaaggaggaagagctgaaggcaatgatgcatgagatgtagcaaaagttgtacttctgaaatatgaatctgaaaagcttcaaaatccctctattttgagaaatgaaattactatttaaatggagaagatcacattttaaatctggaattaagtagattaaatgtaaactgtaaaacaggaaaaaaccttgcaatgcagacgatggttgaaaatggatagaaacagatttcagaactaaaaatcaaatcctattgtaatttttattaagagcaggtcaacatttcaagaaaaccccgttgctccacacataatagaccagattctgaattacatcagtgcacccctgacatcaatgctcaattcttaggaaaacttataaacaatttcctctcaatgccagccaaccccatcacacaaaaattctttcccaagacccatccttcagaaaccctccacgttgctgggcgcagtggctcacacctgtaatcccaagactttgggaggctgaggtgtgtggatcacttgaggtcagaagttttgagaccagactggccaacatggtgaaaccctgtctcttaccaaaacctcaaaaattagccaggcgtggtggcacatgcctgtaatcccagctacttgggaggctgaggcacaagaattgcttgaatctaggaggcggaggctgcagtgagccaagatcgcgccactgcactccaacctgggtgacagagcgatattccatctcaaaaaaaaaaaaaaaaagaagaagaaagaagaaagaaagaaagaaaaaaagaaagaaagaaagaaagaaagaaagaaagaaagaaagaaagaaaccctccatgtcttgctcaggctttccattatttttaaaaaccccagactttttcctacctttctccttttttatattggaacaaccaatcattctattctggtacaaaaattgactttctattttctgttataattgagaccacacaggatactttctcagacaaaaatacttttagtatacattttgtattcataattacatgtactaattagaacttttaattcttaggaacactaaattttaataaaaacttagtaattttgagctgttaaatattaacattttatgaatgtatttcataatagctggaaaatattgtaggaaacaatttttaatgtggaactgacatgtaattgattgacctatttttcctgacaaattacttgatcttagtgcttctctccctctttaacccaatagtgctcgttcatctattttggcagaaaaaaatatatgaataacatatagacaggaaaaagtataaacataaagacaaacaaaaacaaagactttatagtttttaaaaatttattttgttcttacattatatttgtacatatttatgggatatgtgtgaaatgctgttacatgcatagattgtgtaatgatcaaatcggaatattcagagtatccatcacctgagtatttatcatttctatgggctgggaacatttcaagtcttctctagctattttgaaatatacaagagtgttgttaacgatagccactatactctgctatgaaaccttagaacttattccttctgtctaacggtgtggttgttcccattaaccaacctctcttcatcccccacgccgacacacaccctttccagtctcatgtctatcatttcactctctacctccttgtgaacaacttttttagctcccacatatgagtgagaacatgggatatttgtctttctgtctggcttatttcaattaacagaatgacctccagttccattctctctttgtctcaaagagacaaagtttctttgtaatacgtcatatgtcatatatagcatatgacagtttgactatcatatgctatatagatgatctttgtggcttatacctatatggaaatctctaagcctcctgtatttcaatgtctaattctcttgctagacttggaaagttttcagctattattttgttagtgtttttatgcctttgaccttctcattttctagaatactcaaaatttgaaatacttagtctctttatggtgtcctatatgtcacataggttttgttcattcttattttttttttctctctctctctcttatctgggttatttcaaaagacttctgcttggtctagtctattgctgtgcctctcaagtgtattttttattttgtgtattgaattcttcagttccagaactttgctttagttcttttttataaaatctatctctttgatgaatttctcattcacagtttgaactgtttttctgatttttttttgttgtttatctgcattctcttttacctcactgaaatttcttaatatgataattttgaaatctttttctggcatttcatgaatttatttttattggaatttgctgttggagaattattctgatcctttgtcaaattgccttggttgttcacgtttctggtgtctttatgtagatatccatgcagctggtgtaacaatcactcctttcaatttttcattgactttcgtagaggaagactttttcctgaagatgtttctatgatgataactgggaaggatactttagctttgcacagaccatggtgaggctttcctaggaataagaacggcagctgggccagccttaggcctctgtggtagcagcagcgagccatgcatgctttccttgggcccttaagaggcatatgcaggcaccaatgttagtgagtccaggtggaccaattctcaggccttcaggcagcttgctcagatgccggcagtggcagtggtaagccagatgggtaagtagaactttgagcttccaggcagctgtaaaatcagtaacctaagattgcaccttatggaactgggaaaagaagaccaaactaatctcatagctagcagaagggtggaaataaatattagaagagagataaatagacaacagaaaaacagtagaggaaaacaatgaaataaaaatgtcattctttaaaagatcagctaaacattaataaatctctagctagactgactaaaaaataaaaaataagagaaacatgcagataacccaaatcagaaatgaaaatgggaacattctacttacttttaaagattattaagaataaagataaatttagcaattgaagtagaaagtggttaaaaagatcataaaagactgttatgaacaattgtacaacaagttagataacctggattaaatgaataaatttctagaaacacaactagcaaacgtgactcagaagaaatactaattctgaatagacctattctactatgatctgtttctactcacagcactcctgataccaagtatgtaggggtttttcccaccaacaacaaactctccaactctccagacaccaactgcttgtccaattattcagttcaatttgacatgacctgcaattagggcagctccgtaggttaaggattcagttccacaagactgccctgcacatcagacaccaatcacaagtctaggccacccatacttctgattaactggctataaatcaaggtgccgtgaaatcctataattttatgttgccttagcatccattctaaatataagctagattttcccacaccagtagtagggcttagtcacccttgacccagtttccagttctctgcctcctcacaggtcctcagtgtggtcaatccagacatttgctttatataattgcctgctggtcaccacccctctatagaggagctacatacaacctacttgcctcacccactgacccctcccccaacaacttctgcactgggcatggactgcgcaggtatgccacagtgaccacctcttggtcaccgcatgaccccatggaactcatgccgccttgctttaaatccaccagttggcctaggcgccgtggctcatgcctgtaatcccagcactttggaaggctgaggtgggtggatcacctgaggtcaggagtttgagaccagcctggccaacatggtgaaaccccgtctctactaaaaagacaaaaattagccgggcgtggtggcacgcacttgtattcccagctactcaggaggctgaggcaggagaatcgcttgaacctgggaggcggaggttgcagtgagccgagatcgtgccattgcactccagcctgggcgacgagaaaaaaacttcgtctcaaataaataaataataaatccaccaattagaattcccctccaaaatctgcttgggtaatttcccagtccctagttaaggctttagggccacatatcctccctctctgtcactccccacccactggttgcacatgcctgtcttgaatggcttcccacttcccactggccctgcaatgtgtgctgctgtcttctctcggatctgtaagtaatagatggcttctgatgtttcatacgtatgattgtgctgccttctctgtgtcttacctggccaacacactcgagcctcgcttttttcatggttagagctttcctagagagtggttatcaagagttatcttgtctgacaccaatcagacaagagccacaagggcatctgccagtataaacaagtttcctgtgagcggaacacctggccacaggtcacacacttaggcattaggcagtctgccaggataaagcagtatcccatgaaaggcacactgtaaacatccacaatcatcttccctagagccccatcagggcaggcctagaatttaagccacttttcagagagagatctgaagaccaaattagaaagaatttttacaacatgagcattctcacaactccctccttgggttcaataatttgctagaatggctcacacatctcagggaatacagtatacttattaccagcttatgttgaaggatattataaagcaggggtccccagcccccaggctgtggaccagtaccagtctatggcctgttaggaactgggctgcacaacaggaggtgagcatcgggggagtgagcattactgcctgagcactgccttcagatgagtggcaacatgagattctcatagaagcattaaccctattgtgaactgcacatgcgggggatctagggtgcccattccttaggagaatctaatgcctgatgatctgaggtagaacagtttcatcctgaaaccatcccccttctgccatccatggaaaaactgtcttccatgaaaccagtccctggagccagaatgactggggaccacttttataaagcatacaaatttatagccagatgaagaagtacgtagggtggggtccaaaagggtcagaagtgcaggaccttctgttccatggagttggattgcaccaccctccttgcaaataggtgcattcatcaacccagaggctccctggaccttgtttcaggtttccatgaaggttcccttatgtaggcatgactgactaagtcactggccattggtgattaactcaaacttttttggcccttcttccttccctggagaggaaaaaggggtgtacagctgaaagttccaaccctttaatcacatggttggttcctctggcaaggggcccaccaagagtcatctcaacaaaaactcagatatggttgaggcttaatataataacaaaagacttactcctatcactcaagaagtttcaacggttttacagtctctctgccaggaacctgggacctagatcaaacatatattttttattttatatcacaatctataacaagaaaagagagggaataattttaaaactactcacaaagaaaagggcaggatcagatatcttccttgatgatgtctatcaaacatttaaagaagagttaacaccaatctttccccaactctcccaaaaagtagaagggggaaacatttcttaatttatcctatgaagccagcattaccttttttatcaaagccagacaatgaaataacaagaaaggcaaaccacgggccaatagccctcacgcatacaggtgcaaaaatcctcagcagcatacaagcaaatcctatgcagtggcttaccaaaaggattatacaccatgaacaagtgagatttatcccaggaaaacaggaatgcttcaacatatgaaaatgaattataatgcaccacattaataagatgaagcaaaccacatggtcatttcagttgatgcagaaaaagcattttacaatattttacagcctttcatgattaaaaaaacactcaacaaactgggaatataagagacttcttcaacatgataaagagcacttatgaaaaacccacacctagcattatactcaagggtgaaagactgaaaacttaccccctaagatcacaagacaagcccagttttgacagttctattcaacactgtattagaaattctagccaaagaaattagacaagaaaaaaatttcaaatttgaaaaaagatgaaatctatctttattagcagatggatatagaaaatcctaaagaatccacacacaacaaactattaaagctaaagaataaattcagcaaagttgctgatacaagatgggcacacaaaaatcagttgtatttctgtgctagcaatgaacaatctaaagaggaaattaagaaaacaactttataatagcataaaaattataaagtacataataataaacttaaccaagaaaattgcaagacttatacatagaaaactacaaaacattgccttgacctccctcagttaccttgtgattctgtgtgttgtgttgggacaaatggggaggtgacagagagaggccaatattgtgtaaccatgtaaccagcactgacatttcctcaagaatattcccccaaagataagcctttgaactgcatagttgctgtgggtggtgtctgcacattctttattgggataatgtgtgctcttaagccagggaccccaatacccctctttagttgtgcccagagacccatccctaggaaaccctcctccagtgaaaactaccagtttcctgagtcttagcccctcactctttaccttctttctggagtcacacaatcctggaagctccatggggtccaattcactcttgagagcccataatgattcccccattctgctatgaaatcccacagcacattgcaagccctaataacatatctattcatgttgtaatgacatacataaattgacccatggacccaatgatccaggagcccatatttccacttacaacaccctctcccaaagtcatacacctctgtaatatcctaatcaaagagatatttctatgatggtaaagtaatttgaaagtaatttagaaattataaagaaaaatcgaatgaattcaggatccaagttaaatttgtgaatataggaatggaatataggctgctggggaatagcaatttctggtggggaattgagaccgcaacacaccacagttgttaccagtggagggtgtccaggttcttcgtgtcttgaacaaagaattggacaaaatgcataaattaaggaaggaataaatggatttattgaaaatgaaagtacactccacagtgtgggagctggcccaagcatagggtctcaagggccccgttacagaattttcaggagttaaataccatctagaggattccagtggttacttggtgcatgccctatgtaaataaaaaggatgaagtaaagttacaaagtcatttactcggtgtacgccctatggaggggctatttcctgtcatagctgaagtgtgaagtggccttatgtttcatgcctccagatcctatttgcctgcctcacagctaacatatgtgattcgggacagaagaaactcatagtgtcacaggacaggagtctgtcatctcccgagacccaggggactcctgaagacaacgacctcgtgtgaaggggagttctagggagaggcagatgctgacccagggaggacttcaggatagggactttcagggaagcagtaaggcctgcagaatcctaggcccaggaagaagatgcagcattcagggctgcacttgagaggcctaaaacggtgagggaggcagagctcaagagcttgactctatctcctgagtcagggatttatagggaataaggcaggggagggaagacagtgaagggactgaagtaggaaaatgactcagcagtgtgaagaggcttaattctccctgttgaaaacgagatgccctaccgtcctttttcttagaacatttactttagaaaacttgtaagcacttctctcttagacatgcatttgaatgcctccgaaaactgggtcgttcttttgccagctttatgacccagtgatgtctttctaaagaacctgggaaacttctctttgaaatgtaaacattaaggaaaatagcaccccatcccctagtttctgtgggagtgtaggagcctcgcatcaggctcttggagccttaatccaagctgcaaaacgacttcttgtcataaagtgtatgaagtttgtgtttcctctggataaagccaattacctataacagatggtcaccccaactaccaggtgaatctaggatgatctatgtgtgaccaatggggcagtcaagtcctcttacttgagaactagctattatttgccttgaagacaagtatgttctacttggctacataaaagtgcgagatttctttgcgtctttgcaatggcttagtggcttgcctgtgacgcacatcacatttgggtttaatgctttttcaaactattttctttctctaccatctttgcagagaggttttctacactgggaaaagattttgtttttaattgtgtctctccaacagcaggcagtgtctacagagcttcgaggcacaaacgtcgtttcaaggacctagcctgaggacgactttaaggggatacagatgcgcaggggagcaactggattcccagcgtctcataatgacgccgggactctcaagagaggaatgggtgtgcagattttaaagtctagaggatcccggacatcggtgcggaacactgtagaataggagtgcaagtttgaaagaggaagacggaaacccttctcactgacgcgtgacctctccatccgcttccgggtctgcgggcaatccctctcatggcagggcggggtcgcagcgtcctggaccagcgcctagaccctggctggtctcgcaatggagagggctggatccgaggtgggagccgagataggggcgggtctgggaaaggggcggagcctggccttcctagtttcgccccgccccaggaagtttcccggtctgtgggttatttttctgcccaactacatgatggtcctcatttgcagccatttgaatctctgtgatgtcttcctttttctacatagacacggtaacagtctgatctctctttccaccacaatcttacaagtgtaataaatgtggcaaatttttcagacatcgttcatacattgcagttcatcagtgaactcaaactggagagaaaccttacaaatgtcatgactgtggcaaggtcttcagtcaagcttcatcctatgcaaaacataggagaattcatacaggagagaaatctcacaagcgtgatgattgtggcaaagcgtttacttcacgttcatacctcattagacatcagagaatccatactggacagaaatcttacaaatgtcataaaggtggcaaggtcttcagtctgtgggcactccatgcagaacatcagaaaattcttttttttttttgagacggagtcttgctctgtcgcccaggctggagtgcagtggcacaatctcagctcattggaacctccgcctcctgcattcaggcaattctcctgcctcagtctccggagtagctgggattagtggtgtgcgccaacacatcacgctaatttttgtatttttatttatttttattttgtattttattttatttttgtcttcagatggagtctcgctcttgtcacccaggctggagtacagtggtgtgatgtcactgcaacctttgcttcccaggttcaagcaattgtcctgcctcagcctcctgagtaagctgggattacaggtgcctgccaccatgcctggctaatttttgtatttttagtagagagggggtttctccattttggtcaggctggtctagaactcctgaccccagctgatccacccacctcagcctcccaaagtggaaggattacaggcatgagccactgcgactgacttttttttttttttttttgagcctgttttgcagcatttacaaatatcagggttttcccacgagatcatgaagattttcacataagagatttctggccatttgtgttggtgttggcagtccaggtcaagcaggaatatgtaataacattcaagctacccacctttggccacattcctgcatttgtagttcatattttgatgaaactcagctacttgggaggccgaggcaggagaatcactggaacccagaaggtggaggttgcagtgagctgagattgcaccattgcactccagcctgggcaaaaaaaaaaaaaaaagaaaagaaaagaaaagaaacttagtctaaaaaaaaaagtcatgcctcttctcctcctctttccgtcatcgtggtgtgtgcttgactccgcttcttgccatgtcttctcacaagactttcaggattaagcgagtcctggccaagaaaagcaaaattgtcccatttcccagtggacttgcatgaaaactggcaataaggtcacaatcatgttaccatatcaagctgaaagtgtcaccactacctggagagttggacatgttttattgggaatatattttttaatctctgaatctgttatgaatgcattggttggctgggttcaataataaatatgtaaacatttcatttcaaaaaaaatgtcaaatgaagtaattcgatagagtaccttgatctttgttttgtttttttgagctggagactccactatgttcagtggatcacacctgtggtccacgcaccttgggaggctgaggtgggaggattgcttgagaccgagactcctggtaatcttctcgtctcttctaacccagtttatgacagacccttggactttactttgttatccacctgtgacccggaagccccccaattccagttattgcacctttccagaccaaaccaatatatatcttacatgttttgattgatgtattatgtctccctgaaatgtgtaaaaccaaactgcagcctaaacactttgggcacatgtcatcaggacctcctgaggctgtgtcacgggggcatttttaaccttggcaaaatagatttctaaattgagtgagacccagtagatacttttggttcacgagctcatgaacacagaaaaaatcaagagaaaaaaatctagagagaataggaaaaaaactagatgtaatggaaagcacaaaatcaggtccaaaatctgaactctttcatatgtactcaacataaggaaatgctcttcaactttgtgtgaaagatagattacgaacatttgattaaaataaaaacccattctatgtgattttagccaatttaaccctgcaaataatgatcaattatatacatacataaaacttcctaatatttcacttagtgttgctatttctatgttcttggggcagaagctcagcctgtcagatacattacaagacagtggtgtctccataattgtgcttaggactctgtgttgcatgagtggacaaactgttaagcaggaacctaggagagctagggtgtcaaagttcaagtccattaaaactagcaagacgtaggccgggcgcggtggctcacgcctataatcccagcactttgggaggctgaggcaggtggatcacgaggtcaggggttcgagaccagcctgatcaatatggtgaaaccccgtctctactaaaaatacaaaaaaaatagctgggcgtggtggcgggcgcctgtagtcccagctactcaggaggttgaggcaggagaattgcttgaacccgggaggcggaggttgcagtgagccgagatcgcgccactgcactccagcctgggcgacagagcaagactctgtctcaaaaaaacaaacaaacaaaaaaaacaaatagcaagatgtattccttactgctcactcacgagtcacggttataagatgtttacggttaaggaaagcagcttattgatacctgcaaggacaaactcctacagaaacacaatgtccagatgacccaatatcccatgacagcgtattcttttaagatagcaggctggggttgaactcctgacctccagtgatccgcccgcctcggccttccaaagtggtgggattacaggcgtgagccaccgcgctggcctgaagtggtattttttagaaaccacgtaatccttttttcagcttaataacccccatggatgtatttctgaaggacttggggtctctctttgaaaggcaaagaacaagggagacagtacccgtatctcggtaggaaattaaatatttcaaacatcaaataattccaatgtaaatgtatggatctttaaataattctgagccttgaaaggaatgtggtcatgcaagctgagtccagtggtatgcaggcgcaacttctaagagttttcctggccagacgcggtggctaacgcctgtaatcccaacactttgggagtccgaagcaggtggatcacttgacgtcaggagttcgaatccagcctggccaacgttgtgaaacccagtctctactaaaaatacaaaactattagccaggcttggtggcgcgcgtctgtaatcccagctagttggcaggctgaggcaagagaactactttaacccgggaggtgaaggttgcagtgagccgagatctcgccactgcactccagcctgggtgacagagaaatactctgtctcaaaaaagaaaagaaaagaaaagaaaaatctaaatataaaaatgaaagtaatagatctcttccacaaatgtgctgggacaactaactggatatccacgtgaaaatgaataatgttggatccctaactcacaaaatcaaaaattttatttaaagaaattttaaaaaaggagagagagagagacgaggaagggagcgctgccggaggaggtgttactttgtcgcccaggctaacttggaccccccccccggctcagcgatcctcctgccactgcttcctgagtagctgggacctcaggctttcgccccgcgcccgcatctctgctgtgtttaagcagtaggtggtgacctcactcctccctggcctgagcactccgtcccgcatcccagggggaggccctagggaaatctctgaagctgaggacagggtggactctcctttcccagtgaatggagaatagaaagggagaggatttctattctgttctgtgggccgtcagcatgaaatcgtatgttccacccaggcagggctttgcatttcacattctagtttgcatccccgtttcagacaattccagggcttttgaatcatgcctcagccttcctgtccggtctcgcctccaaagctcgaaaacaagaggcgctgggagcgaggttgagagacgcacgggtcccaccccggccccgccttctgccaattctaaaggggaaggtctctccgcttcgcgccccgcccctacctcgctcaggccccgcctacctccccgcgggtcccgcccaggcctggcttctgtcctgcgcgcgcagattcgcgcaaacccggaagcggatcgcatggagtgatggtcccaccgcagcggtgagttttgctctgtgttgtgttaagtctgcgcttcccaagtccccggcgcttctgtacctgggacgtggggtccccatagacctggaaattctcacccgtgttccttcacctagagcaaatttagacgtcctcgtcagagtccaggggtcgcttccttttgggtttaaagtcgccctgaggatggtcccttcccgaatctttctgctatagggcaatgtatacacttcccatcgcgtagtttccctgctcaaaacctttttctgactcctcccgacccgcactttttaaagtccttaccgcgaggcggattcccgcccttggcgcctcccagtcttgtcttaaggcgccgtcgccccccacctccctcctcgttccaggcccttatgctccccaggtctccccaccgcagtcaccgcttaccctgagcccgcgttggggaggtgcccggggctgtcctatgacaccgggtgttcttgcctgccctgcaccagcccctggaaaatgcgctcctccgggatgcaggcgtcttactccaaagccctcctgtgattgtgttggccaaagggatcaggagactgagagagagagcagtagaaaacctgagacagagaaaagaagaatgagaaagaccataacagatggcaaagtagaggatgagtgagggatttgccaagagagagcaaaaatgaaaaaaacaaaacaaaacaaaaaacagcaggaggagcagatcccagggaaaaagaaaacaagagctagagagagaaggggagaatgagagatatgtacagaattagggagggaagcacagtaatgaagaaaggggggctgggcgcagtggctcacgcctgtaatcctagcactttaggagactggggcagagggattgcttgagtccaggagttcaagaccggcctgggcaaaatagtgagacccccccccccatctctgtcaaaaaaaaaaaaaatttaactgggcgtgatggtgcacacctgtaatcccagctgctctggaggctgaggcaggaggatcacttgagcccaggaggtccaggctgcagtgagcagagatcatgccactgcactccagcctggtcaacagagcagagcctgtctcaaaagattaaaaggggtgggggactttgggttcagatgagtgggtgagttcattggatatgattagttgtgatatgttgacttctgtttatataatctaataacttagaacttgtttaaattatacagatgatattgagaattttaaaattcctatctataagacacatacattctgtaaatcttggcattagaggtcagcttccacttggaatccctattcagccagagggtagtgacttaattcaattgtgagagcctctcttccctcttcccatggtgaggtaggaaatggggcagtgaagtgggagaaaaaaatcactttctgttattatgtaataattttaatttaattaattaatttatagtttgagacagggtctggctctgtcgcccaggctggggtgcagtggtgtgatctcctctaactgcagcctcgacctcctaggctcaagcgatcctcttacctcagcctcctgagtagctgggaccacaggcgtgagccaccaagtccggctaggttttgtattttttttttgtagaaatggggtttcactgtttcccaggctggtctcaattctggcctcaaaggatcgtcctgccttggcctcccaaattactgggattacaggtggaattacagagaggagccaccgtgcctggcctacatagtcgttttttgttttttgtttttgtttttgtttttgtttttttgagatggaatctcactcttgtccaggatggagtgcaatggcacaatctcggctcgctgcaatttccgcttcccaggttcagactgattctactgcctcagcctcccaagtagctgggattacaggcatgagccactgcatccagctaattttgtgtttttagtagagacggggtttctccatgttggtcaggctggtctcaaactcccaacctcagatgatccacccgccttggccccccaaatgctgggattacaggcatgagccaccacgcctggcccatagtactttttaaaagggacatcagggcgtagtggctcatgcctgtaatcccagcactttgggaggcggaggcaggtggatcacaaggatcacaaggtcaggaattcaagaccagcgtgaccaacatggtgaaatcccattgctcctaaaaattcaaaaattagttgggcatggtggcatgcacctctaattccagctacttaggaggctgaggcaggagaatcacttgaacccaggaggcggaggttgcagtgagccaagattgcgccactgcattccatcctgggcgagagcgagactccatctcaaaaaaaaaaaaaaaaggaacatcaaagctgggcgtggtggctcatgcctgtaatcccagcactttgggagccaatcacctaaggtcagtagtttgagatcattctggccaacatggtgaaaccctgtgtctagtaaaaatactaaaaaagtaagctgggcatggtggcatgcatctgtagttccagctgctcgggagcctgaggcatgagaatcacatgaacttgggaggtagaggttgcagtgaaccgaaatggtaccactgcactgcagcctggggggcagagcgaggcttcatctcaaaaaaacaaacaccaccaccaaaaaatgaaagcaaaaggcacatcaaaagtgcttttgttctcgttgtgtaacatattttcttttttttctttctggttcctcttccttcctttctttctttcttttttttttttttttttttgcagttttactttgagataaatcttagttttaaatatttcttttttaatacataatcacttctgaaagatgcatttgcagcatcctataaccagctcacattgttcagttattttcccattgacatctgaatttgttcgattttttaaaaaacaatttccaaatagtttctgtttgaaattagttgcgtccagttcagatcgaggtctgcatgctttctagtctttattatttattggaaacctttaacatcaaaatgtagtttaacgagttagcctgtttttcagttttgttgtcatttgttaaaatcttgagctgtgagctattaagtgcatgtttccctcaaggcacctctggtccatgtggacaaatgttgaaagcccaactcctcactgtggctccatagccctgtgtccagggcccctgccagtgtccagcctcctcctgggagcttgccctcatcgcatgactgtctctgccccagtcatatttgcttttctcttttcccaaacactaaaacccttcctgtctcaggttgctgtccctgctcttaccctgtgttcctaaatgatcacggccctgtgcctttcttctccttcaggtctaggctcagagatgtctcccatgccctcccacccccatctgaagttccctctgcccgtcagtctctatcacgttactcagattttattatctctgcatcagtcacatcagaaacactctttttattttattttcttttttttagacagagtctcactctaccgtccaggctgtgagtgtagtctggtgaccttctctccctgcaacctctgtcttctaggttcaagcaattcttctgcctcacccttgcaagcagctgaaattaaatgtgtgtgccaccacagccagctaatttttgtattttaattttaatttaatttaatttaattttacttttgagtttcaatctgtctcccaggctggagtgcagtggcgtaatcatggttcactgcaacctcctcctcccgggttaaagtgattctcctgcctcagcctcctgagtagctgggattacagagtcgcaccaagcccagctactttttgtatttttagtagagatggagtttcaccatcttggtcaggctggtctcgaactccagaccttaagtaatccacctgccttggcctcccagagtgctagggtacaggtatgagccaccgcgcccgccccaatttttgtatttttagtagagacagggtttcaccttgttggccaggcttatctcaaactcatgacctcaggtgatccgtctgcctaggcctacccgtgtgctgggattacaggcaagagccacagtgcccgcccagagatgcctttctgcatggattattttgagtgttttgtgtctcccttctttggaggatgcacagttcccatcttggccacaggacaactgcagcacctactctggggttgtggttcagatgctgaggcgtcttcagggaagactcagggcctggggcaagtgcaaggatggtcccacatttcttctggaaatttcaattctaattgatctgaacttcctgtggctatttatttcagtcaaaataaaaggagaaggcctcactaaggtcagaaagccctacagaccagaccctgtgtcctcaggcagtgccgaggcatctccatttttgtcatctgtgtcactgcctcactccagctcccgggtctccgtgctctgtacatcaccaggacccagtttggccattatgggcaggggctttgccaccagtaggtgatgcgctcagcgtcaagggtcctggattcccttcaggaagggtggggagaaggtcagggacctgaggggcatgaaggacacactcctacacaactagttctgttccggagcagctggaggctccgtgactttaggaaagattcttccaagaatcaagagtgcaaacagcaccgtgaactgcagcccgagggccacctcctcctgccaggccagtggtgatgacgctctactggcttttccttgcctgtcacaacacgtgagcacacacacacacacacacacacacacgcacacacacactcccacacacacagtcacaaggcagctggggagtcgaaggtcaagatgctataatgtaaatgtgtggccgtgtgtggtggctcacgcctgtagtcctacagctttgggaggctaaggcaggcagatgatgaagtcaggagttcgagaccagcctggccaacatagtgaaatcccatctctactaaaaaaaaaaaagaaagaaagaaagaaaaaaaaatgagccaggcatggtggtgcacatctgtaatcccagctactcgggaaactgaagcaggagaatggctcgaacctgggaggcagaggttgcagtgagccgagatcgcgccattgcactacagcatggtgacagagcaagactccatctctaaataaataaataaatgtgctataatgtaaatgtggagcacaaatattttttccacaaagaggggccactggttcctgggaagggagtttgagggttatagccctggtcatggccagaagacttaggaactggaggaaggaaaagctgtatttatcctcacaggatgctcctgtgaacagatgggctgatctaatggagtgacatttagaaaaaggggtttttctctccacccagcacacaccgtcacccaccctatgcacagtcctccctttcccgttgtcttctctagaatgacaaagttgatgcttccccaggtgggcgtctgagggaggggagtggtttccctgcctgtccttgatcccctccctcaagtcttccaccttcgtgtccgctgttctgttctgacactcattgcctgcaattctatcggtttgcaccatcccaagacccaactaagacccaaggatttgagtctgggaatatttaagccaatgtcattgccaagtcagaagtcttagaccccaggaatttttcttcattgagagtctgggcagccaggaagcctctcctctttctgcagagttgaggtcaaccaggaccctggcacatgtgagaccccagaggggacatactagtatcactcagtcattctcattcattcactcactcagtagctatgaagctatagtatatgccaggggacacaaatagaggtgctgtctgtgccagggatcaaaatgttaaaccaacagactatccttccctgctttatccaggttatttttcatttttatttatttgaggtggagtctcactctgtcacccaggctgaagtgcagtggtgcgatcttggctcactgcaacctccaacctctgggttcaagcgattctcgtgcgtcagcctcccaagtagctgggactacaggcacacgccaccatgcctggctaattatttgtttatttattttgagacagagttttgctcttgtgtcccaggctggagtgcagtgccgtgatcttggctcactgcaacctctgcctctggagtttaagcgattctcatgcctcagcctcctgagcagtggcgattacaggcgtgtgctaccatgcccagctaatttttgtatttttggtagagacagggtttcaccatgttggccaggctggtttcgaacttctgacgtcaagtgatctgtccgctttggcctcccaacgtgctgggattgcaggtgtgagccactgtgcccagcctcatctcgtggctttaaactttacccccatggccccatggcccctgcagacctctcccctgaacgctacagtcctgtgtccagttgactccttaactctctgctgggaggatgaacaggcatctccaccttcatgtgtccaaaggtgacttcccgaacttccgtaaacgcattcccccatgctcctgcccttctcagatgagggtgaccttgtgcttcctaggatatcactaaaatctcagcatgcttttaaaatgtaaaggataattacattgtttataagggttttaatttgtaatataaagaaaaaattacatgtttactcacaatgggtgaagaaattcatcattttaaaaattctttggaggtgtgggagaaaaatgttagaagacctcatccctgcctgatctgccctcccaggtcctctctgacctcatctgtttcccgtgtcctcctccctccctctgctccagccatgcaggcgtctttcctgttcctgggccgaggttgctcctgcctcaaggcgttcatgtgggctgtccctctgctggaactcgctggcccctcagctgcaggtgcaaacacccctccttccccaggtctctgttctgatatcaccttctcagtggggacttctgtgacccacctcccatttcacactccagctacaccctcaccccctcctctggtccatattggctgctctgcatgcttctttctgttttttcaccttccactgcctgtaggagtttatcgtccctggtacagtgggcagcagaggggaccatatttcctcagggtgaggtctcctttgtatgtttcattgtgttaacggagggggtgtgttgattctgagcaataaacaacatatttttaacattcaggattgacttctaaagactcttggtacgtgaggaagaaacccggaagaggaagaggaaagcaaaggagtcagggatggctctttctcaggtgagatgatatgttgggtggattgttctgtctccttcctctcagaaatcctgggccttggagttgggaatcttctctgagtctgaagcatcctgcctgacaggtttgctcgcactcacccatgccttccctcagtccctctcatctcgcttagattccatctcttgtgacacagtgacatcaacttgggaagaggccgcactgggcatggtcctgggaagggctcacaccgagacatggatggagatgggatgagggccccatggtgtcagtgctgttgggcagcagggattgttcaggggccacatctggatgcactgtcagctctctgtgaaccaggattagagcagctgccaatggaagtcatgtattcatgtgcacaaagtaggtggtaaattctagaaaaggtgaccaataaggggaaacgttttctgcctgattttatactacatttttagttttttgagtgagttactgtgtttctgactccaaaaatcttagtaattagaatggaaagttcatacacagacatgaatgatagaagatgttttattccatcatttctttaagaataggaaatcaacctgaatcatagcaggagattcattcaaccattcttagcacattaaagctcatggagactgtggggttactgcggagaggcttgtgaaacaggtgttttcaggaaaaatggttataatttttctcaaatatgggagcagtacttcatttttatcctagaggatggtgccatattctcattccacctattattatttttatattattataatattattatattttaaatatacaaagtcttgctttgtcgcccaggctgaagtgcagtggcatgatcttggctcacggcaacctccacctcccgggttcaagagattctcctgcctcagcctcccaagtatctgggattataggcacgcaccaccacacccggataatttagttgcatttttattagtgacgggctatcaccatgttggccaggctggtctcaaacttctgacctaaggtgatctgcctgcctcagcctcccagagtgctgggattacaggcatgagccgtgcccagccccaccaattattattaaatatatatttttatatgtaaacatcacatgatatatttatttgttttctggtaaaactcgaaggaaagctgcagcttagacccattgccataaagcatctcttttccctgtcacgtcctccaccctccttccagcctcattgtggagccgctactgtcagttctgtgccatgggtcagagcaaatctcgcgcgtctgtatttctgcatcgttacgagactttagaaaaaattctgcggtaaatttaaaaaatatatatttatggttttactttaggtttggggcgccatgttcaggtttgttacataggtaaagtagggtcatcagggtttgttgtacagattatttcatcactctgctattaatccccgtatccaatagttatttatttatttatttattttttgagactgagttttgctcttgttgcccacgctggagtataatggcatgatctcggctcactgcaaccactgcctcccaggttcaggcgattctcctgcctcagcgtcccgagtaggtgacattacaggtgcctgccaccactcctggctagtttttgtattcttactagagacagggtttcaccatgttggccaggctggtcttgaactcctgacctcaggttatccacccaccttggcctcccaaagtgctgggattgcaagcgtgatccaccgcgcccagcccccaatagttattttcttctagtcctctccttcctccccgcctccaccctcaagtagaccccaatgtctgttgttttcttctttgtgttccagtaaatattttactttgatatttgatcctactggttgtgaaaatttacatgttgtcatgttagttaacatggctagcttgccctttgacatctgcattagaaattgactggatgacctgtgtgttctttgcaatttttccctgtataaagagtgccatagtggctgcctctgtgcacacctgcgttactacagatacctgaagattcctccaggtcaggcggttgaaagggtgattgcttcttctaggatggggcattccctgttttcttagatctgacaagattcccccctgcccccacctgccaatgtatcctcttctaccaagatgtgattcttcttaagttaaacaaaacttgccactttttatatttttaaaacctttctatatatgcacacccacctacacaagtatacacacacacatgcatatacatacatatatacacacacgtatatattttgaacatcttttattttttgaatatctgggggaaatgacaatcctttgtattaacatctagttttttgtgagtctgtgtaggttttattattttgtggacatatgtatatataaaatggattttcatactttgagtcatctagttttcatgtattttcttttattttgagactgggtgtcactgtgctgccgaggctggagcacagtggcgcgatcttagctcactgcaacctccaccctcaggctcaaaccatccttctacctcaggctcccaagtagctggaaccacaggtgcctgccaccatgcccggctgattttttttttttgagatggagtctctgttacccaggctggagtgcaatggtgagatttaggatcactgcaacctctgcctcctgggatcaagcaattctgcgtcagcctcctgagtaactgggataacaggcatgtgccactgtgccaggctggattttagtttctgatcctgatctttcactgcggacgttgtcatctctgaagacatcactcataccctgtctcatctagatactgaatgtcacttgcattgtcagtaaaagtttctgggccaggcacggtggatcacgcctgtaatcctagcactttgagaggctgaggcaggcagatcatgaagtcaggagttttgagaccaacctggccaatatggtgaaaccccgtttctactaaaaatacaaaaattagctaagaatagtggtgcatgccaggaatcccagctcctcaggagactgaggcaggagaatcacttgatcctgggaggtggaggttgcagtgaactgagatggcacctttgcattccagcctgggtgacagagcgagactctgtctcaaaaagaaaaaaaaagtttctaacatttctgtaacgagaaccctacattgatttttattttattttatttattttattttattttattttattttattttattttattttgggatggagtttcactcttgttgcccatgctggagtgtaatggcacaatctcagctcaccacaacctccgcctccctgcttcaagcaattctccttccacagcctcccaggtagctgggattacaggcatgtgccacaacgcctggatgatttttgtattttttcttttttagtagaaacgggatttctccatgttggtcaggcaagtcttgaactcccgacttcaggtgatctgcctgcctcagcctcccaaaatgctgaaattataagcatgaggcactgtgcccggctcctgcattgatttcttttgtgtgtatttttagtattatccacaaacatcagaaattcatactgagagggtattgtgacctcttcaaaaggtataagaaggccggtgtggtggctcatgcctgtaatctcagcactttgcgaggccgaggcaggtggatcacgaggtcaggagttcgagatcagcctgaccaatatggtgaaactccgtctctactaaaaatacaaaaattagccaggcgcggtggcaccagcctgtaattccagctactcatgaggctgaggcaagagaattccttgaacctgggaggcagaggttgctgtgagccgatatcgtgccactgcactccggcctgggtgacagagcgagactccgtctcaaaaagaaaaaaaaaaagaagtgtaataaaacacaactcagaagacaaaatgtggtgaagaatcccttactcggatttgtcagaacattcactacaattaaatccatgctttcctctctcctcttctcatttcgtgtaaagataagaactcctcccataaccatttccttaaaatgtgttttcatttcagggtctattgacattcagggatgtggccatagaattctctcaggaagagtggaagtgcctggaccctgctcagaggactctatacagggacgtgatgctggagaattataggaacctggtctccctgggtgaggataacttccctccagaagtggggatgtgcccttgtgtatctttgtattttctcttttttttagatacaatgtcttgctctgtcacccagggtggagtgaaatggtgtgatcatgtcttactgcaatcttgaattcctgggctcatgtgattgtcccacctcagcctcccccagtagctggtacaggtgcatgccactatgccgggctacttttttagtttttttttttttttgtagttgttgtttttgtttttgtttacaaacaaggtcttcctgtgttgttgaagctggtcttggtctcctgggctcaagagatcctccttggcctcctgagtagctgggattacaggtgccaacccccatacctaattattggtttttattttttaaattgtagcatatgtgtgtccttagggtttatatgagttttctttggacaacatgtagttggttcctgttgattgagccagtctttgccttctgagtgcagagttaaatatttacatttgaagtattactgatggagaagaccttaccgttgtgtttctgtttcatgttatctgtatctcttgtaggtttttttggttattcatttctcatttattactttttgcgtttaattgcttttttgtgtagacatgctttgactcccttcttattgacttttgtttatgatggagtctcactctgtcgccaaggcagcagtgccgtatgtgatcttggctcaccgcagccggcttcgctctcgtgctcaaaaaattctcgtgccccagtggctcatgcctgtaatcccggcactttgggaggccgaggcaggcaaatcacctgaggtcaggagctcaaaaccagcctggctagcgtggcgaaattctgtctctactaaaaatacaaaaattagccagacacgatggtgggtgcctgtaatctcagttactcaggaggctgacacaggagagttgcttgaacccgggaggcggaggttgcagtgaaccaagatcatgccactgcactagagtctgagagacagagcgacactctgtctcaaaaaaatattttcatcacctgtgaaaactattctttctccactagaactctttgttctttatgttagaattatttctgtgtgtgttgcattttcaatatcacgtacagtgttttctcatgctgttttcctctaaataataggaaagttgtgttatgaagaaaaggtacacttatacaagtttctgtgtctatccttttatttgcttatttatttatttatttgacgaagttttgttctgttgcctaggctggagtgcaatggcacaatctcaggtcactgcaacctccgacttctgggtttaagtgattctcctgcctcagttttccgagtagctgggattacaggcctgtgccaccatgcctggctaattttgtatttttagtagagacagggtttctccttgttggtcagactggtctcgaacttctgccctcaggtggtgatccgcctgccttggcctcttaaagtgctgggattacaggtgtgaaccaccgcgcccagcttatctgtctttttatttacctttactggagaactttttgtatatttgtgggttggagttactctttagacttctttcatttctttctttcttttttttttttttctttcttgagaaggagtctgtctgttgcccaggctggagtgcagtggcgcagtcttggctaactccaacctttgcctcccaggttcaagtgattctcctgcctcagtctcccaagcagctgggactacaggcacatgccaccacacctggctgtttttttttttttttttctgtagagatggggtttcaccgtgttagccagaaaggtgctgaaaggatggtgctgatctcctgatcttgtgatcctcctgcctcagcctcccaaagtgctgagattacaggcatgaaccaccgtgcccagccagcctcacagtttttaaaacatgttattgttattagattggcttcaagtattgcaatagtacagtctctaaacttcctttgtttaataagatttgtcagccttcggtgatgttgatgatgagatgttcctgttcctgtctcagtcatttcactgtcctctcagaaatagcttagactggccagccaaggtggctcacacctctaatcccagcagtttgggaggcagaggtgagtggatcacttgaagtcaggagtttgaaaccagtctggccaacatggtgaaacatgaaatctactaaatacaaaaaattggccaagtgaccccacagactcacgcctgtaatcccagttctttgggatgctgagacgggcggatcacctgagttaaggagtttgaggccaccctggccaacgcggtgaaatcccgtctccactaaaaatacaaaaattagctgggcatggtggcgggcacctgttatcccaagtaactcgggaggctgaggcaggagaatcacttgaacccaggaggtggaggttgcagtgagccgacattgtgccacttcactccatcccgggtgacagagtgagactccaggctgaggtgggagaatctcttcaggcaggagaatcatgccactacactacagcctgggtgatagagcgtgactcaatctcaaaaacaaacaaaaaaggtagtagcttaaactgggaggcttacggcacagatatttatttctcatgaatttggaaagtgggaaatccaagagcaaggtgccagccacattggttcctggtgagagcattcttcatggtttagcccagccatcttcctgctgtgtcctgacatggtggaaagaggaacaggaaacgagctctttaatatctctttttataaaagcactagtcctattcatgagtagtcaacacccatgaccaaattctctcaaaggccccatctgcaggaacatcctattggagaataagaactttgaacctggcttttggccaataagaacattcagaccagggagcctgcatcatcttgttaatgtttttattgtgcaatttgttatatacaatgttttctctgatctcagtttataaattttcccagtacacattctatgttttatattagtgcatagtgaactagataactaaggccaatgcttatatatggaattgctgtattgcctggctgtttcataaatgtagttgtgacatcgtagttgcaccttctgacattgttagtcaatttttttttttttttttttttttttgtgagacagagtctcaccctgtcacccaggctggagtgcagtgatgcgatctcgtctcactgcaacctccaccgcctgggttcaaacgattctcctgcctcagcctcccgagtagttgggattacaggctcccgccaccatgcccagctaattttttttgcatttttagtagagttagggtttcaccatattggccaggctgctcttgaactcctgaccttgtatccacctgccttggactcccaaagtgctgggattacaggcatgaaccacagcgcccagccgttagtcacttcttattccttataatgctgtgtgtttttttgacctcgtacatcagaaggtaatgatcttaacatgtatttcagttcttatattgtatgctgctggtaagtagaaattgtggctttttttctgttttttgtttttgtttttgttttgagacagagtggcgcgatctcggctcactgcaagctccacctcctgggttgatgccattctcctgcctcagcctcctgagtagctgagactactgccacccgccatcacacccggctaattttttttttttatttttagtagagatggggtttcaccttgttagctaggatggtctcgatctcctgacctcatgatctgcccgcctcagcctcccaaagtgttgggattacaggcgtgaaccactgtgcccggctgtggcttttttcttaataggaaattgtttagaattctgcaggctgtataaatgtacttattatttgcttgctgattttatgggttacgttattttactaattaatttttatgattttacataaggcttttcggtatgtggtatgcaatataactgacacagtccactcgttaatgtcacaaagtgctgcctggcactatggctcacacttataatcccaggagtttgggaggctcaggcgcctaaattgcttgagtctaaagttcgaggccagcctgtccaacatggtgaaaccccatctttactaaaaacacaaaaattggccaagcatggtgatgcatgcctttaatcccagctactcaggaggctgaggcaggagaatggcttgaacccagcaggcggaggttacagtgagacaagactgggccattgcactccagcctgttgtgatggagtgagacttcatctcaaaaatataaaaatacaaacaatttcttaaaatgtcacaacttgccttttctgcatgaatataagtaattttataacagttattcagaaaaatattgtattaactttttaatttttttttcgagatggactcttgtcacccaggctgaagtacagtggtgcaatctcagctcactgcaacctctgcctcttgggctcaagcaattcttgtgcctcagcctcctgagtagctgggactacaggcatgggccaccacgccttgcttaattttgtaatgttttcttatcttctcagtgctatgattgtttgacaatacagaatttccattgattttggttatccttacatgagcttgttgtggattatttaccaatatagtatattgtgtggtcttttagcatttatttgtatatagtaaatatgctgtaaatatgaagaatatatgcttttctcctcattgatgtgacagtgatatgttttttgcaaagtcttatacactttagggtcacagtggaaaaatactccttactttaggcttatatacatttgtgtgctgtcagtgttttgacatgatattggaaataggcttccatagaaatgatttcaagtacatgtaatcgccctttatttattgatgaatcttacccttttgcgttcctaaactttcaagataatgtttgggaagtttaaaataagtattgtttttagtgtcacatttacacatttcagtattatttaccatctatacttaagtggaaacctattggtgtttatattttctagatatctcttccaaatgcatgatgaaggagttctcatcaacagcacaaggcaatacagaagtgatccacacagggacattgcaaagacatgaacgtcatcacattggagatttttgcttccaggaaatggagaaagatattcatgattttgagtttcagtggaaagaagatgaaagaaatagccatgaagcacccatgacagaaatcaaacagttgacgggtagtacaaaccgacatgatcaaaggcatgctggaaacaagcctattaaagatcagcttggatcaagctttcattcgcatctgcctgaactccacatgtttcagaccgaagggaaaattggtaatcaagttgagaagtctatcaacagtgcttcgttggtttcaacatcccaaagaatttcttgtaggcctaaaacccacatttctaagaactatgggaataatttcctgaattcttcattactcacacaaaagcaggaagtacacatgagagaaaaatctttccaatgtaatgagagtggcaaagcctttaattatagctcagtcttaaggaaacatcagataatccatttaggagcgaaacaatataaatgtgatgtgtgtggcaaggtctttaatcaaaagcgatatcttgcatgtcatcgtagatgtcacactggcaagaaaccttacaagtgtaatgattgtggcaagaccttcagtcaggagttaacccttacatgccatcatagacttcatactggagagaaacattacaagtgcagtgagtgtggcaagaccttcagtcgaaattcagcccttgtaattcataaggcaattcatactggagagaaatcttacaagtgtaatgaatgtggcaagaccttcagtcaaacgtcataccttgtgtaccatcgtagacttcatactggagagaaaccttacaaatgtgaagaatgtgacaaagctttcagtttcaaatcaaaccttgaaagacataggaaaattcatactggagagaaaccttacaagtgtaatgaatgcagcaggacctttagtcggaagtcatcccttacacgccatcgtagacttcatactggagagaaaccttataagtgtaatgattgtggcaagaccttcagtcagatgtcatcccttgtataccatcgtagacttcatactggagagaaaccttacaaatgtgaagaatgtgatgaagctttcagtttcaaatcgaaccttgaaagacataggagaattcatactggagagaaaccttacaagtgtaatgattgtggcaagaccttcagtcagacatcatcccttgtataccatcgtagacttcatactggagagaaaccttacaaatgtgaagaatgtgatgaagctttcagtttcaaatcaaaccttgaaagacataggataattcatactggagagaaactttacaagtgtaatgaatgtggcaagacctttagtcggaagtcatcccttacacgccattgtagacttcatactggagagaaaccttaccagtgtaatgagtgtggcaaagcctttcgtgggcagtcagcacttatttaccatcaagcaatccatggtatagggaaactttacaaatgtaatgattgtcaccaagtctttagtaatgctacaaccattgcaaatcattggagaatccataatgaagagagatcgtacaagtgtaatagatgtggcaaatttttcagacatcgttcataccttgcagttcattggcgaactcatagtggagagaaaccttacaaatgtgaagaatgtgatgaagctttcagtttcaaatcaaaccttcaaagacataggagaattcatactggagagaaaccttacaggtgtaatgaatgtggcaagacctttagtcggaagtcataccttacatgccatcgtagacttcatactggagagaaaccttacaagtgtaatgagtgtggcaagaccttcggtcgaaattcagcccttataattcacaaggcaattcatactggagagaaaccttacaagtgtaatgagtgtggcaaggccttcagtcagaagtcatcccttacatgccatcttagacttcatactggagagaaaccttacaaatgtgaagaatgtgacaaagttttcagtcgcaaatcaagccttgaaaaacacaggagaattcatactggagagaaaccatacaaatgtaaggtttgtgacaaagcttttgggcgtgattcacacctggcacaacatactagaattcacactggagagaaaccttacaagtgtaatgaatgtggcaagaacttccgtcacaattcagcccttgtaattcataaggcaattcatagtggagagaaaccttacaagtgtaatgagtgtggcaagaccttccgtcacaattcagcccttgaaattcataaggcaattcatactggagaaaaaccttacaagtgtagtgaatgtggcaaggtttttaatagaaaagcaaacctttcacgtcatcatagacttcatactggagagaaaccttacaagtgtaataaatgtggtaaggtttttaatcaacaagcacaccttgcatgtcatcatagaattcatactggagagaaaccttacaagtgtaatgagtgtggcaaaaccttccgtcacaattcagtccttgtaattcataagacaattcatactggagagaaaccttacaagtgtaatgaatgtggcaaggtttttaatcgaaaagcaaaacttgcacgtcatcatagaattcatactggaaagaaacattagaaatatgaagaatgtgacaaagtttacagttgtaaatcaagtcttgaaagacaggagaattcatactggagagaaagcttacaaatgtaagagtttgtgacaagaatcttgggcgtgattcacacctggcccaacaaactagaagtcacactggagagaaaccttacaagtgtactgagtgtggcaaagcctttagtgggcagtcaacacttattcaccatcaggcaatccatggtatagggaaactttactaatgtaatgattatcacaaagtcttcagtaacactacaaccgtttcaaatcattggagaatccataatgagagattttgaaagtgtaataaatgtggcaaatttttcagacattgttcataccttgcagttcatcggtgaactcatgctggagagaaaccttacaaatgtcatgattgtggcaaggtcttcagtctagcttcatcttatgcaaaacaggagacttcatacaggagacaaacttcacaagtatgatgattgcagcaaagcctttacttcacgttcacacctaattagacatcagagaatccatactggacagaaatcttacaaatgtcatcagtgtggcaaggtcttcagtctgagatcaccccttaaggaacatcagaaaattcatttttgagatgattgttccaaatgcaatgagtatagcaaaccatcaagcattaattggcattagagtcaattcagcattgacttgagtttgaattgacttaacattgagttcaagcattaattgacattaaagtgtttatgttaagaagattgggccaggcggggtggctcacgcctgtaatcccagcactttgggaggccaagaccaatagatcacttgaggtcaggagtttgagaccagactggccaacagacatgagtcacttttcccaccctgtattttgtttctttaataaaaactgttacgggtttttatgggtatctgttgaatctaaatcacatttgtttgtataatcattcaacaatattaagacttccaatccatcaatatgggttgtatgtctatttagtttttttgatcaatgtagatttcaaggtacaagcttctcacctccttaattcagtttatttgtaagtattaagtttcatagcaaattgaagtgtgttcataagtttctttaaacattatttattgttaatgtaaggaaattcaactaattttgggtgctgattttgtattctgcaaatacattgagtgggtttattagtatcagtaaaatcttggttgattctttgtgattttctttcttttttttttgagacagtctcactctgttacccaggctcttttctttttttttgagaaggagtctcactcttgtcacttggactggagtacaatggcacgatcttggctcactgcagcctctgcctttcgggtttaagtgattctcctgcctactaactgagattacaggtgcctgccaccatgtccgtataatttttttgtatttttagtagagacggggtttcaccatgttgaccaggtttttcttgaactcctgacttcaggtgatccgcccccatcagcatcccaaagttctgggattacaggtgtgagccaccgcacccagccagtgattttctatatagaatgtcgtatcatctacaaggaaataatttttttttttgagacaatgtctctctctgtcgccaggctagagtgccgtggaatgatctttgctcactgcaacctctgtctcccacgtccaagcaattctgtctcagcctcctgagtagctgggactacaggcgcatgtcaccacacctagctaatttatttattttttttattttagtaaagacggggtttcaccatgttggcccagatggtgggccaacatggtgagtaccttgaagagaacttgaaagaatatgttagatcgcctaacctcattatccgcccacttcggacttgcaaattgctgggattatgggtgtgagccatgagcccggccccaacaaatgtaattttacttctgtctttctgatttggatgagttttatttcttttgctatttaattgctctgcctaggacagccagtatttattgaatatcaggggtgagagcattcttgcatcatgtgatatcctacaggaaaaccattccattttccttcattggttatttcagctgtggtcatttcatggatgatttttatatttttgaggtaaaactctacctatattgtttaggatttttacgaagaatgaatattgagttctgtgaaatgctttttctctatctattgagataatgtgttttttatctgtcattctgtgcaagtgtgtatcccattgatttgagtatgttgaaccatccttgcatcccatgaataggtagcacttggatgtttacaatccctttttatatcctcttgaatacagtttgctagtataagggtcttcaagaagttcatggaaaaatacatattatgaaaaatttgtgcataaatttcacactttttgtaccaaaataaaccagtataaacttgttataacgtctgaacaggctctagtttgaggcactcagaaggataagacatcagtttgaaaagaacctctatcacagcaatacaaattctgttaaaacaagaagaaacatcaaatttacgatgagaccagacgcagtggctcaggcctgtaatcccagcggttttagaggcccaggcaggtgggtgacgtgagcctagggattcaagaccagcctgggcgacataggggacctcttctctgctaaaagtaaaaaaagtcagccaggtgtggtggtgcactgctgtggtcccagctactctgggcactgaagtgggaggatcagttgaagcagggattttgaggctgaagtgagccctgatctcaccactgcactccagcctgggtgacagagctagaccctgtctcaaacaagcaaataaatgagaggcataattcctcctttgagaataaaggaaaagatttcccttccttttgtctcttttctcaggacgtttatttagaaaatttgtaaatgaggccgggcgtggtggctcacgcctgtaatcccagcactttgggaggctaaggtgggcggatcacgaggtcaggagatcgagaccatcctggctaacacggtgaaaccccgtctctactaaaaatacaaaaaattagctgggcgaggtggcaggcacctgtagtcccagctactcgggaggttgaggcaggagaatggcgtgaacccaggggggcggaacctgcagtgagccgagatcgcaccactgcactccagcctgggtgacagcgagactctgtctcaaaaaaaaaaaaaaaaaaaaaagaaaatttgtaaatgtattttctctgtcttcagaagtggtattttttagaaacaataaaacttgttttcatcttagtggtgatccaggggtgtttttctaaaggacttgggagttctgtctttgaaatgccaacaacaaaaaagatagtacatctatctcagtagtaaattaagtaattcaaaatgaagctgggtgcggtgcctcacgcactttgggacagtgaggcaggtggatcacctgaggtcaggagttcgagaccagcatgaccaacgtggtaaaaccccatctctgagatacaaaggaggttgcagtgagtggaggttgcaccactgcactccagcctgggcaacaagagtgaaactacttctcaaaaaaaaagaaaaaaaaatcaagtaattccaatttaaagctgttggacctttaaataatcctactttttttttttttttgagatggggtacccctctgcatcacaggctggagtgtggtggcctaatgtcagctcactgcaacctccacctcccgggttcaagtgaatctcctgcctcagcctccggagtagctggtattacaggcatgtgccaccacgcccaactaatttctgtatctctagaagagatgggattttgccatgttggtcagcttggtctccaactccagacctgaagaaagtgatccgtctaccttgacctcccaaagtgctgggattacaggcatgagccactgcctccagcctcttcttttttttttttttgagatggagtttctcttgttgcccaggctgaagtgaaatgatgctatctcagctcactgcaatttctgcttcccaggttcaagcaattatcctacctcagcctaaacctaccaaaatcaaaatggctaggagagtgacctgtggtcgtcctcactgctacacccccaccagctccatgacagtttaaaaatgccatggcaacgtcagaaagctacgctataaggtctgaagaggggaagcatgaataattcaccccttgtttagtagatcattaagaacctcactcatccctggcctgcgtactctgtcccgcatcccaggcggtggccctagggaagtctccggagctgagcacagggtggactctccctcccgagtgaatgaggaatagggagaggatttctactctgttctgtgggccttcagcataaaattgctctttccacccaggcagagatttgcattttacattctagtttgcatccccgtttcaggcaattccagggcttttgaattatgcttcagcatcccgggcgggtctcgcctccaaaacctggaaaacacaggctgcagagcgaggcggagcaaattgtaggccccgccctgcccagcccagccccgccccgccccggggatccctaccccgcgggccacttatccacttccgtgccacgccccttgcccttcgcgccccgcccttcctcgcccgggccccgcccaccttatcagggttcctcccaggcctggctcctgtcctgcgcagattcgcacagacacggcagcggatcacctcagtgaaggtcacactgcagcgcctgagtttggctctgtctctagttaagtcggcccttcgcaggcccctggctctgctatacttgggacgtggggtccccagagacctggaaattcccacccccttttctccaaatagagcatattgagacttccctgtgagggtctgcaggtcgcttccttttggggttttttttgcagagacagagtctcactctgtcgcccaggctagagtgcggtggcgcaatcttggctcaccatgacctctgcagcccaggttcaagcaattctcctgcctcagcctcctgagtagccaggactacaggcacctgccaccgtgcctggataatttttgtagtttttggtatagacagggtttcaccatcttggccaggctggtcttgaactccttgtcaggcctctgagcccaagctaagccatcgtatcccctgtgacctgcacgtgtacatccagatggcctgaagcaactgaagatccacaaaaaagtgaaaataaccggttcctgccttaactgatgacattaccttgtgacattccttctcctggacaatgagtcttagaagctccccactgagtaaaaggatattaaccccagaggcaacaaaagaaattaaattagtggaagaaaaaattcagtcagcacaaataaatagatcccttagtctcactccaacttttgatttttgctactgcacattctccaacaggcatcattgttcaaaatactgatcttgtggagtggtcattccttcctcacagtacaattaagacttttacattgtacgtggatcaaatagctacattaattggtcagaaaaggttatgaatagtaaaattgtgtggaaatgacccagacaaaatagttgttcctttaaacaaggaacaggttagacaagcctttatcaattctggtgcatggcagattggtcttactaattttgtgggaattattgataatcattacccgaaaacaaaaatcttccagtttttaaaattgactacttggattctacctaaaattaccagacataaacctttagaaaatgctctgacagtgtttactgatggttccagcaatagaaaagcagcttacacagggccaaaagagcgagtcatcaaaactcaatatcaattggctcaaagagcagagttggttgcagtcattacagtgttacaagactttgatcaacctattaatattgtatcagattctgcatatgtagtgcaggctacaaaggatgttgagacagctctaattaaatatagcatagatgatcagttaaaccagcagttcaatttattacaacaaactgtaaaaaaaaaagaaatttcccattttatgttactcatattcgaggacacactaatttaccagggcctttaactaaagcaaatgaacaagctgacttactggtaccatctgcattcataaaagcacaagaacttcatgctttcactcatgtaaatgcagcaggattaaaaaacaaatttcatgttgtagggtccagccccatagggtcggtgggtctctccccatgtgcagagatgagagagtgtagaaataaagacacaagacaaagagataaaagaaaaggcagctgggcccgggggaccactaccaccaatgcacggagaccggtagtggccccaaatgtcgggctgcgctgttatttattggatacaaagcaaaaggggcagggtaaagcgtgtaagtcatctccagtgataggtaaggtcacgtgggtcacgtgtccactggacagggggcccttccctgcctggcagccgaggcagagagagagaggagacaaagagaaagacagcttacaccattatttttgcatatcagagacttttagtactttcactaatttactactgctttctagaaggcagagccaggtgtacaggatggaacatgaaggcggactaggagcatgaccaccgaagcacagcatcacagggagacggttaggcctccggataactgcgggcgagcctgactgatgtcaggccctccacaagaggtggaggagcagagtcttctctaaactcccccggggaaagggagactcccttccccagtctgctaagtagcgggtgttttcccttgacacttatgctaccgctagaccacggtccgcctggcaacgggcgtcttcccagacgctggcgtcaccactagaccaaggagccctctggtggccctgtccgggcataacagaaggctcgcactcttgtcttctggtcacttctcactgtgtcccctcagctcctatctctgtatggcctggcttttcctaggttatgattatagagcgaggattattataatattggaataaagagtaattgctacaaactaatgattaatgatattcatatataatcatgtctatgatctagatctggtataactattcttgttttatattttattatactggaacagctcgtgtccttgctctcttgcctcagcgcctgggtggcttgccgcccacagatgtcacatggaaacaggcaaaaaatattctacaacatggtacccagtgtcaagtcctacacctgcccactcaagaggcaggagttaatcccagaggtctgtgtcctaatgcattatggcaaatggatgtcacacatgtaccttcatttggaagattatgatgtgtccgtgtaacagttgatacttattcacatttcatgtgggcaacttgccagacaggagaaagtacttcccatgtgaaaaaacatttattgtcttgttttgctgtcatgggagttccagaaaaaatcaaaactgacaatggaccaggatattgtagtaaagctttccaaaaattcttaaatcagtggaaaattacacacacaacaggaattccctataattctcaaggacaggccatagttaaaaaaaactaatagaacactcaaaactcaattagttaaagagaagggggagacagtaaggagtgtaccactcctcagatgcaacttaatctagcattctatactttaaatgttttaaacatgtatagaaatcagactactacctctgcagaacatcttactggtcaaaagaacagcccacatgaaggaaaactgatttgataaaaagacaacaacaataagacatgagaaatagggaaggtggtaacttgggggagaggttttgcttgtgtttcaccaggagaaaatcagcttcctgtttagatacccactagacatttaaagttctacaatgaacccatcagagatgcaaagaaaagcacctccacggagatggaaacaccacaatcaaacaccatcgattcacaaggtgaacaaaatggtgatgtcagaagaacagatgaagttgccatccaccaagaaagcagagccgccgacttgggcacaattaaagaagctgacacagttaccaaaaaaaagcctagagaacacaaaggtgacacaaactccagagaacacgctgcttgcagctttgatgattgtatcaacggtggtaagtctccccttgcctgcaggggcagctgcagctaattatacctactgggcctatgtgcctttcccgcccttaattcgggcagtcacatggatggataatcctattgaagtatatgttaataatagtgcatgggtacctggccccacagatgatcgttgccctgccaaacctgaggaagaaggaatgatgataaatatttccactgggtatcgttatcctcctatttgcctagggagagcaccagcatgtttaatgcctgcaatccaaaattggttggtagaagtacctactgtcggtaccaccagtagattcacttatcacacggtaagtggaatgtctctcaggccacaggtaaattatttacaggacttttcttatcaatgatcattacaatttaggcctaaacaaaagccttgccccaaggtaattcccaaagaatcaaaaggcacagaagttttagtttgggaagaatgtgtggccgatagtgcggagatattacaaaacaatgaattcggaactattatagattggacatgtcgaggtcaattctaccacaattgcacaggacaaactcagtcatgtcccagtgcacaagtgagtccagctgttaacagtgacttaacagaaagtttagacaaacataagcacaaaaaattacagtctttctaccctttggaatggggagaaaaaggaatctctactccaagactaaaaataataagtcttgtttctggtcctgaacatccacaattatggatgcttactgtggcctcatattgcattagaatttgatctggaaatcaagctatataaagaagagatcgcaagccattttatactatcgacctaaattccagtctaacagttcctttgcaaagttgtataaagcccccttatatgctagttgtaggaaatatagttattaaaccagactcccaaactataacctgtgaaaactgcagattgtttacttgcattgattcgacttttaattggcagcaccatattctgctagtgagagcaagagaaggcgtgtgggtccctgtgtccatggactgaccgtgggaggcctcgccatccgtccatattttgactgaagtattcaaagccattttaaatagatccaaaatattctttaattgcagtgattatgggactaattgcagtcacagctacggcctctgtggcaggagtttcattgtactcttctgctcagacagtaaacttttttaattattggcaaaagaattctacaagattgtggaattcataatctggtattgatcaaaaattggcaaatcaaattaatgaccttagacacaatgttgtttggatgggagataggctcacgagcttgaaacatcatttctggttacactgtgactggaatatgtcacatttttgtattacatcctaagcctataatgagtctgagcatcattgggacatggttagatgccatctacaaggaagagaagatgatcttactttagacatttcaaaattaaaagaaaaatttttgaggcatcaaaaacccatttaaatttggtgccaggaactgaggcaatcgcgaaagctgctgatggcctcgcaaatcttaacccggtcacttgggttaaaaccatcgcaagttccactattgtaaatttcatattaatccttgtgttcctgttctgtctgttgttagtctgcaggtgtacccagcagctccgaagagacagcgaccattgagaatgggtgatgacgacgatggtggttttgtcaaaaagaaaagggggaaatgtggggaaaagaaagagagatcagactgttactgtgtctatgtagaaaaggaagacataagaaactccattttgatctgtattaagaaaaattgttctgctttgcgatgctgttaatctgtaactttagccccaaccctgtgctcacagaaacatgtgctgtattgaatcaaggtttaatggatttagggctgtgcagggtgtgccttgttaacaatatgtttgcaggcagtatgcccggtaaaagttatcgccattctccattctctgttaaccagggacacaatgcactgcggaaagccgcagggacctctgccctagaaagcctgggtattgtccaagtttccccccactgagacagcctgagatatggcctcatgggaaaagaaagaccttatatcccccaacccgacacccgtgaagggtctgtgctgaggaggagtagtgaaagagggaggcctctttgcagtcaagataagaggaaggcttctgtctcctgctcatttctgggaatggaatgcctcggtgtaaagccgaccattcattctattctgaggtaggagaaaaccgccctgtggttggaggtgagacatgctggcagcaatactgctctgtgactctttgctacactgagatgtttgtgtgaagagaaacataaatctagcctacgtgcacatccaggcacagtacctttccttgaacttattcatgacacagattcctttgctcacgtttccctgctgaccttctcgccaccatcaccctgttgccctgccacactcccctcacaaagatagtaaaaatagtgatcaataaatactgagggaactcagagaccagcgccggtgcgggtactcgcacactgagctccggttgtctgggcccactgctgtttctctatactttgtctctgtgtcttatttcttttctcagtttctcatctccacctgatgagaaacacccgcaggtgtggaggggcaggcccccttcaggctgaggcaggggaatcacttgaacccaggaagcagaggcttgcagtgagtcgagatcccaccactgcactgcagcctggatgacagagaaatactctgtctcaaaacaaaagaaaagaaataagtaaatacataaaagaaagtaacagatctcttccacaaatgtggaatggacaactaactggatatccacatggaaaagaacaatgttggatccctatctcatacaatcaacctcttattttaaaacgtaaaaaaaaaacaacgaaaaataaagagagaaagagagaaacgaggaagggagccctgcgggagggggtgttactttgtcgcccaggctggcctggacccccaggttcagcgatcctcccgccctgcttcctgagtagatgggacctcaggctcccgcgcccgcgtccgcatccttgctgtgtttatccggcaggtggtgacctcactcctcgctggcctgagcactccgtccagcatcccaggcggtggctttagggaagtctctgcagctgagcacagggtggactctccctccggagtgaatggagaatagaaagggagaggatttctattctattctctgggccgtcagcatgacattgtaagttctgcccaagcagggctttgcatttcacattctactttgcatccgcgtttcagacaattccagggcttttgaatcatggatcggccttcctggccatctcgcctccaaaacccaaaaacagaggcggtgggagggaggctgagagacgcacagatcccgccccagcccagccccgccccgccctctgccggtactaaagggcaaggtctctccgcctctacccctacctggcccaggccccgcccacctcctcgcaggccccgcccaggcctggcttctgtccttccccgctcagacgcgcgcaaacccggaagcagatcgcgtggagtgaaggtccctcagcggcgcgtgagtttcgctccatcttgtatgaagtctgctcttcccaggtccccggcgcttctgtccctgggacgtggggtccctacagacctggaaattctcacccgtcttccttcgcccagagcaaattgagacgtccccgtgagagcccgggggtcacttccttttgggtttaaagtctccctgaggctggtcccgttccggatctttctgctatagggcaatatatacactttctatcgcgtagttttcctgctctaaacctttttctgactcctcccgccccgcgctttttaaagtcctcacccgagaggtgaattcccgccctgggcgcctcccagcctcgccctcgtcggcccctagagcgcagcgtcgcagctccggtcccggggaggccgagttctctgcctgtcctgggatcctacaaaccccacccttgtcttaaggcgccgtcgccccccacgtccctcctcatgccgggccctgctgctccccaggtctcccatccgcagtcacagcttgccctgagcctgcgttaggggaggtgcccgggttctgtcctgtgacacggggtgttcttgcctgcccagttccagcccctggaaaataagctcctccgggatgcaggcgtcttactccaaaccctcctgtgattgtgtgggccaaagggatcgggagacagacagcagtagaaaacctgagacagagaaaagaagaatgagaaaggcccataacagatggcaaagtagaggatgggtgagggatttgccaagagacagcaaaagtgaaaaaaaaaaaaaaaaagataagcaggaggagaaaagcaactagagaaatgtagagaaaagctagatgtacagagagatgaaggacagcaaggtagggagagggacagcaaagagggaggctcatcagggtgagggagaggaggagggatttggagccagggcagacagagcagagtggtgctggtggcaaagagaacagagggagaaccacagcagggaggacacctggggatctggggtgccagagagtggggacagggggtataacagagaagagagaatttaacggggagagcagaggaggcgcagagatggtgttgcgggaaactgaggactagagagactgatatgggggagacaggaggatgtttatttaaggtacacagcggctcagcagatttacatctaaaaagctgagcatttcaacaaacacagagtgggttttttttgctttcagaagcagagtagaagcagttaatcatataataggtcacgtaatctatagcatagcataacttgtgtccttccatagctggtggccttgtagctgcattgaaagaaaaacaagaacagctaaatacacacgtttgtcctttttttttccttcacccttgttctggaggtgggggtgtcaggagctcattcctttggcttcaacttctcaaacagcgtctcataactgttcttgaagtgagcttgctaggcagaggaaaacttcttttctttttaacccttgccttgcctgttactattcttggagtgaatgaatacatttttttttttaaatttctgcttcagtttcttcccttagatgctttttattatcaagattttaatagaaagcatcactattactggattcttcatgaaagagcaggttttcttctttaggcacaggctgatatttatacagagctattagctgagtggtagtctgcctggttacaattgcttctatagttgattaaatgttcttaacaaggagaggtaagaggtaagggagtattaaaccaattcttagtatttctagaactactcctattaaggttttgaatcgactgaaggaggaaaaccagcctctaaagagggactcgggagtctactttgtctaagtctggactggaacatgggataattttttcatacttgcagttatttctataacagccttcctgttgtcattgatttctaggcagcaattagttagattaaactttctacatactcctccttcctaggctaggaggtagtctaaagctaatctattttggtagatggcatttctcattttcatggcttactgggccagtttcattagtgatgatttcaagtactgcttgcaaatttatgatgtggttaagcgtgtaaatcggggtgcgatacctttatgacttatctcgtgcccaggtagctggcctagagtacagaattagtctttcagggggccagtctgtatctttctaatcttctatttttatgtcttttcttatgtctatatctcttttgttttttttctttaattttgttgtagacaggataccttaaaatttctccttgttgcaatgggagttagaagaaagatggtctgattgtttcaagtacacaagcccttgtccatttggctggcaactgtcagtaggcctgtggcacacagttctaatagagaccagagggtgcttgccaggtatttggagcttcaagctgatactatgtgtggtttagagaagagaaacgggagaatgagtttggatgaggtgatctggagtcatctttgccttgccacaaagttttctttagtgttttattataatattgctgtcttaaacaagttaattcttctagtgactctgtaaaagcttttccttagtgagcaacacagtatctcctgataatagaagtttttaagagctaggggcttgaaactgtgggcattgctttgggggaagagtcagttagagttaaattatcttgtggcattaacgcttttgcttcttaaggccagtggtctcctatgttagtccttctacaaacataacatgaggaaatgcttaggctgctagcaatgttttcagctagccaagcaaacaggcttttagctaaaggaggaggctctggtaacttctggtctacctgcttgtagaataatttaaagatttggaattgttgctgggccagaagggtcggggttccttttttgataacatataggtaggttgctgggtaggtgtgtgtggagacatgaatggggtaacctgcggtccacacgggtaagtctggctttagaatggtgaaatttacgggatgacagatttttgtttcacaatctggttttaccggcattttggtaagcatgattgtcctttgttgtgtgctggggtgccacgatatgcaatactgagaatctttttctggggtctcagaaggacaaggtggcatgcatacgtatctgtagtcatttctatagtatctttttataggtaggttaccatagacagatgagtctaggtctgctgatgacaagcatcaaaatacagagaaataggccctcggtaaaagggaaggaccttggtttggtttaaaagggaacttttttttgaccttgcatgaattttaaactattcaccaggtgaaaacttggagttataagatacataaggttggttattttcttggtcacaaattgagtagattgtctatgtacaagttctttttttttttgagctggagttttgctcttgttgcccaggctggagtgcaatggcacaatcttggcccactgcaacctccacctcccaggttcaagtgatcctcctgcctcagcctctcaggcacccaccaccatgcccagctaattttttgtatttttagtagagacgggtttcaccatgttggccaggttggtctcaaactcctgaactcaggtgatccacctgccttaacctcctaaagtactgggattacaagcatgatccattgttcccggccacccatgtattcttgatggaaacaatttgcttatgtcttagttctacagctgaccttcttttcactgtttttaaggtcaatagctgtgggttcgcacttctgcattttataaatgttactgtgattttcttgtaaggaagaattaaacgtcgggaaccaaaggcaacagaaccttgcaaaagaagtttctttttttttttttttttttttttttttttgagacggagtctcgctgtcacccaggctggagtgcagtggcgcgatctgggctcactgcaagctccacctcccgggttcacgccattctcctgcctcagcctccccagtagctgggactacaggcgcccgccaccacgcccagctaattttttgtatttttagtagaggtggggtttcaccgtgttagccaggatggtctcgatctcctgacctcgtgatccgcccgcctcggcctcccaaagtgctgggattacaggcgtgagccaccgcgcccggccaagaagtttctttagcccagatatgtgaaagatacctctctaattttcaaggataggggtgataaagaccaacacttccattagctcttccaggcccccatgtaataattcaggtagctgggtgcggtggcccacgcctgtaatcctagcactttgggaggctgaggcgggcagatcaggaggtcaggagatcgagattatcctggctaacttggtgaaaccccttctctactaaaaatacaaaaaattagccagatgttgggtggatgcctgtagtcccagctactcgaaaggctgaggcaggagaatggtgtgaacgtgggaagcggagtttgcaccgagatcctgccactgctctccagcctgggagacagagcgagactccatgtcaaaaaaaaaaaaaaaaaagaacaggcacaccttctcactcatctcagaccttctcagggtaacttggtgaaaatttccctgctctgagcccagtgagcctccctgcaacttggagatgaggggctagaccagaaaagctcaacccgagtgaccctggccccttaaatggttggcaaaatagaatgcatgtctgggtgtggcttttcttctgggagaggggagtgcccagttgtaattagaattttaaatgggatgcagtaccccaaaaatgaaaaaaaaataataaaatgcagaagaatggaagaaacagagttgcagactcagacacagagactatcttcggggcctttctctgtatgaggacatcacagccaaatctaaagcaggtcacgtcagtccctggcagggaaccctccaccggcttcccgtgttccccaggacaaaagcccaactcctcactgtggctccacagccctgtgtccagggcccctgccagtgtccagcctcctcctgggagcttgccctcatctcatgactccctttgccccagtcacatttgcttttcgcttttcccaaacatcagaacctttcctgtctcaggtcgttgtccctgctcttaacctatgtccctaaatgatgacagccctgtccctttcctctgcgttcaggtctaggctcagagctgtctcccatgccctccaccccatctgaagttccctctgcccatcagtctctatcacatgactcaggttttattatctctgcatcaatcacatcagaaacgcttttttttttttttttttagacagagtctcactctgtcgcacaggctgtgagtgcagtctcatgatcttggctcactgcaacctacgtctcctgggctcaagcgattcttgtgtctcagcctcccaattagctgagattacaggtgtgtgccaccacactcagctaattattgtatttttatttttagtttagttttgagtctcattctgtcacccaggctggagtgcagtgacatgatctcggctcactgcaaccaccacctccagggttcaagcgattctcctgcctcagtctcccgagtaactgggattacagacacctaccaagcccagttactttttgtatttttaatagagacaaggtttcaccatgttgaccatgctggtctcagacttctgacctcaagtaatccacccaccttggccttccagagtgctagtattacaggcgtgagccactgtgactggctcaatttttgtatttttagtaaaggcagggtttcactatgttggccaggctggtctcgaactcctgagctcaagtgattctcccacctcaacctcctaagtagctgggagcacagacacacagacatgcaccgctatgcctggctaagtttttatatttttggtagagatggggtttcaccatgttgcctaggctggtctcaaactcctgagctcaagcgatctacccctctcagcctcccacagtgctgggatgacagctgtgagccactgcacccagcctctgtatgaagtttggtcaggtctgggtcggtgccctgaagagctcattccagcccagctccccactgctgcagcgtgtgtgtaggcttccccaggaggggagtgggagttttcctgtaggagtttattgtacctggtacctggtgtggagggcagtagaggggactgtatttcatcagggtgaggtctcctttgtatgtgtcattgtgttacagggagggtgtgtgttgattctgagcaataaacaacatatttttatcactcaggattgacatctaaagactcttggtacatgaggaagaaacccggaaaaggaaagcagaggagtcagggatggctcttcctcaggtgagacgatattctcagtggattgttctgtctccttcctttcagaaatgctgaccttggagttgggaatcttctaagtctgaagcttcctgcctgacaggtttgctcacattcacccatgccttccctcagtccctctcatctcacttagattttatctcttgtggctcagtgacatgaacttgggaagaggctgcactgggcatggtcttgggaagggctcacaaccagacatggatggagacggggtgagggtcccgtggtgtcagtgctgttgggcagcagggattgttcaggggccacatctggatgcactgtcagctctctgtggaccaggattagagcagctgccactggaagtcacgcactaatgtgcacaaagtacgtggtaaattccagaaaaggagaccaatattgggaaatcctttctgcctgattttatactatatttttaggtaattgaatgggttgctgtgtttctgactccaaaatcttagtaattagaatggaaagttcatacacagacatgaatgatacaagatgtttgattccatctttattttaagaatatgaaatcaacctaaataatagcaggagattcattaatccatttgcagcatattaagctcatggagaccgtggtgttactgtggagaggcttgtgaaacaggtgttttcagtaaaaatggttataacttttctcacatatgagagcagtacttcatttttatcctagaggatggagccatattctcattccacctgttacaattattattattatgatattctgataatattattatattttaaatataagaagtctttctctgtcacccaggctgaagtgcagtggcatgatcttggctcatggcaacctccacctcccaggttcaagcgattctcctgcttcagcctccccagtagctgagattataggcatgcaccaccatgccaagctaattttgttgtatttttattagtgacaagtatcaccatgttggccaggctagtctcaaactcttaacctcaggtgatctgcctgcctcagcctccaggagtgctgagattacaggcatgagccaccatgcccagccccatcaattattattaaatatatatgtttatatttaaacatcacatgatgaatatatttgttttgtggtaaaactccaagcaaagctgcagcttataccctttgccataaagcatcttcttttctctgtcgtgtcctccaccctccttccagcctcactggggagccgctactgtcagttcggtgtcaggtgtcaggtgtggtactcatgtatttctgtatcgttatgagactccggaaaaattctgcagtaaattacaaaattttttttttacaaaaattaaccaggcatggtggcgcatgcctgtaatcccagctactcaggaggctgaggcaagagaatgacttgaacctgggaagcggaggttgcagtgagatgagattgtgccactgcactccagcctgggcacagagcaagacttcgtctcaaaaaaaaaaaaatagtttttatatttatgtttttactttaggtttggggctgcatgtgcaggtttgttacataggtaaactagggtcatcagggtttgttgtacaaattatttcatcactctggtattaagcccaactgcaacctctgcatcccgagctcaagcgattctcctgcctcagcctcctgggtagctgaaattactggggcctgctaccacacctggctaatttttgtatttttagtagagatagggtttcaccatgttagccaggctgatcttgaacttctgacctaagatgatccacacacctcggcctcccaaacagctgggattacaggtgtgagcctccttgcccagcccccaatagttattttttctgctcctctccttcctcccactctccccactctcaagcagacctcagtgtgttttgttttcttctttgtgttccaggaaatattttaccttgatatttcatcctgctagttgtgaatttacatgttgtcatgttagtgaacatggctagcttgctctttgacatctgcgttggaaattagctgaatgacaacatgtgggtcctttgtgatttttccctgtataaagagtgccatagtggctgcctctgcacgtgcctgcattcctacagatatctgaaatttcctccaggtcaggcagttgaaagggtgattgcttcttctaggatggggcatttcctgttttcttagatctgacaagattcctccctgcccccaaccgccaaagtgtccttttccagcaagatgagattcctcttcagttatacaaaacttgctattttatatttttacaacctgtatttatatatacatacacacacacatatacatatacatacgtatagacacacacaaatgtatatattttgaacaacttttacattttgaaaatctggggaaaatgacaaccctttgtattaacatctagtttttttgtgagtctgtgtaggtctcattattttgttgacaaatatatctatataatggattttcctactttgagtaatctagttttcatgtattttcttttattttgagactgggtctcactgtgttgcccaggctggagcacagtggtgtgatcttagctcactgtaacctccaccctcaggctcaagccatcctcctccgtcaggctcccaagtagctggaaccacaggtgcctgccaccatgcccagctaatttttttttttttgagatggagtctctgttgccctggctggattggtgcaattttggatcattgcaacttctgcctactgggatcaagcagttctgcatcaccctcctgggtagctgggataacaggcatgtgccaccgtgcctggctggattttagtttctgatctttcactgtggacgttgtaatctctgaagacatcactcatactctgtctcatctagatactgaatgtcacttagtgtgtcaacaaaagtttctgcgccaggcagggcccagaattgggcctgcaattccagcactttgagagactgtatcaggcagatcacgaggtcaggagtctgagacaaacctggccagtatggtgaaactccgtttctactaaaaatacaaaaattaaattggcgtggtggcatgcacctgtaatttcaactactcaggaggctaaggcaggagaatcgcttgatcctgggaggtggaggttgcagtgagcggagactatgccattgcactccagcctgagtgacagagtgagactctgtctcaaaaaaaataaaagtataacaaaacacaactgggaagacaaaatgcagtgaaaaaccccttactcggatttgtcagaacattcactgcaattaaatccatgctttcccctctctcctcttctcattttctgtaaagataagaactcctcccataaccatttggttaaaatgtgttttcatttcagggtctattgacattcagggatgtggccatagaattctctcaggaggagtggaaatgcctggaccctgctcagaggactctatacagggacgtgatgctggagaattataggaacctggtctccctgggtgaggataacttccctccagaagtggggatgtgtcctttcgtatctttgtattttctctttttttagatagagtatctctctctctgtccccaagggtggggtgcaatggtgtgatcatggctcactgcaatcttgaattcctgggctcaagtgattgtcccacctcagcctcccctcgtagtggtacaggtgcatgccaccatgccaggatacttttttagtttctttttttagagacaggttcttgctgtgcggttgaagttggtcttgatctcctgggctcaagacatcctcctcggcctcccaagaagctgggattacaggcgccaacccccgtacctaactattggcttttgtttttaaactttttgcatatgtgtgtccttagggctaatatgagtcttctgtggacaacaagtagttggttcctgttgattgagtcagtctttgccttctgagtgcagagttaaatatttgcatttgaaatattactgatgcagaagaccttaccattgcctttttgttacatattatctgtatttcttgattttttttgttgttattttgttcttattttgttttttcaggtttgttttttgttcttcattctccatttcctgcttattgtgtttaattgcttttctgtgtagacacgctttgactcctttcttctttacttttgtttgtttgtttgtttatgatggagtctccctctgtggccaaggctgcagcgcagtggggcgatcttggctcaccgcagccggctccacatctcgggctcaaacaattcttgtgccccagtggctcatgcctgtaatcccagcactttggaaggccgggggtgggcaaatcacctgaggtcaggagttcaaaaccagcctgtctaacgtggtgaaactccgtctctactaaaaatacaaaattagccagacacggtcgtgggtgcctgtaatccctgctactcaagaggctaatgcaggagagtcacttgaaccctggaggtggaggttgtggtgacctgagattgtgccatgcactcccgcctgggcaacacagtgagactctgtctcaaagaaaaaaagattccacaacctgcaaaagcttctctttctccaccagaactttatttatgtcggaattatttctgtgtatgctgcattttcattaacatatatgtacagtgttttttcatgcttttttcttctaaataataggaaaaaaagttgaattatgaagggacacatataccagtttctgtatctgtccttttatttgcctatttatttatttattaatgagacgaagttttgttcttgtcacccatgctagagtgcaatggcacaatctcgggtcactgcaacctccaactcctgggttcaagcaattctcctgcctcagtttcccgagtagctgggattataggcatatgccaccatgcctggctaattttgtattttaatagacatgggatttctcctttttggtcaggcttttcttgaactcccgccctcaggtgatctgccaacctcggcctcctaatctgctggaattacaggtttgaaaaactgcgcccggcctatctgtctttttatttacctttactggagaattttatatatatttgtgggttggagttactcttaggcttctttcatttcttttttttttttttttgagatggagtctcggtctgtcactcaggctggagtgcagtggcacaatcttggctaactgcaacctctgcctcccaggttcaagcgattctcctgcctcagtttcccaagtagctgggactacaggcatgtgccaccacaccaggctaattttttgtatttttgttttttgtagagacggggtttcactgtgttagcaagaatggtctcgatctcctgacctcatgatcctcctccctcagcctcccaaagtgctgggattacaggtgtgaaccacctcactcagccggcctcaaagtttttaaaacatgttattgctattagatggcttcaagtattgcaaaatttatagtacaggccctaaacttcctttgtttaattagatttgtcagccttcagtgatgtgaatcatgagatgcttcttttcctgtctcagtcatttcactgtcctgtcagaaatagcttagactggccagctgaggtgggtcatgccttaatcccagcagtttgggatgctgaggtgggcagatagcttgaagtcaggagtttgagaccagtctggccaacatggtgaaacctcgaatctactaaatacaagaaattggctaggtgtagtggctcaagcctgtaatcccagcactttgggaggccgagaggggcggatcacctgagttaaggaatttgagaccagcctgaccaacatggtgaaaccctgtctctactaaaaatacaagaattagctgggcgtggtggcacatggctgttatcccaagtactcgagaggctgaggaaggagaatcttgaacccgggaggtggaggttgtagtgagccaaggttacaccactgcactccagtctgggcaccaaagtgagactacaggctgaggcgggagaatctcttgaggcaggagaatcgtgccactacactccagcctgggtgatagagcgtgactcggtctcaaaaacaaacaaaaaaagaaatagcttaaactgggaggcttaagacacagaaatttatttctcatgagtttggaaagtgggaaatccaagagcaaggtgccagccacattggttcctggtgagagccttcctcatggtttagcccagccatcttcctgccatgtcctgacatggtggaaacaggaacaggcaacgagctctttaatgtctctttttatgaaagcacaagtcctattcacgagtagtcaacacccgtgaccaaattgtctcaaaggccccatctgcaggaacatcctattggagaataagaactctgaacatggcgtttggccaatacaaacattcagaccagggagcctgcatcatcttatttatgtttttattgtttaatttgtttcatacaatgttttctctgatctcagtttataaattttcccagtacacattctatgttttatattttatgcatagtgaactagatacatagggcaatgtatatatatatatagaattgctgtattgcctggctgtttcataaatgtagttgtgacatcataattgcaccctccggcactattagtcaattctttttttttttcttagagacgaagtctcaccctgtcactcaagctggagtgcagtggtgggaccttggctcaccacaaactctacctcctgggttcaaacgattctcttgcctcagccttctgagtagctgagattacaggcacccgccaccacacccagctaatttttttgtatttttagtagagttatggtttcaccacgttggccaggctattcttgaactcctgacctcatggtcttcccacctcggcctcccaaagtgctggaattacaggcatgagccactgcacccggctgttagtgaattcttattcattataatgctgcatatttttttgacctcatacatcagaaggtagtgatcttaacatgtatttcagttcttatattgtgtgctggtggtaagtagaagttgtgcttttttcttaacagggaattgtttagaattctgcagtttgtataaatgtacttatgatttgcttgctggttttatgcgttacagttattttaccaattcatttttatgattttacataaagcttttcggtatgtggtatgcaatataactgacacagtttactagttaatgtcacaaagtgccagcgggtgctgtggctcacgcctgcaatcccaggactttgggaggctgaggcgggtggatcacttgaggtcaaaagttcaaggccagcctggccaatatgatgtaaccctatctctactaaaaatacaaaaattagccaagcatgctggcatgtgcctgtaatcccatgtactcaggaggctgaggcaggagaatggcttgaacccaaaaggtggaggttgcagtgagctgagatcaggccattgccctccagcctgttgtgacacagtgaaacattgtctcaaaaatacaaaaataaaaaaaaaattttaaatgttacaatatgccttttctgcatggatataggtaattttatgacagttattcagaaaaatatttttttttttttgagatggagtctcactttgtcatccaggctgaagtacagtggtgcgatctcggctcactgcaacctctgcctcttgggttcaagcaattcttgtacctcacccttgcgagtagctgggagtacagacgtgcaccaccatgccttgctaaattttgtaaacttttcttatcttctcagtgctatgattatttaacaatacagaatttccattgattttggttatccttacatgagcttgctgtggattatttaccagtatattatattgtgtggtcctttagtatttatttgtatacagtaagtatgctgtaaatatgaagaatatatacttttcattgatgtgacagtgatatgtcttttgcaaactgttagacactttagggtcacagtggaaaaatactccttattttaggcttacacatgtttgtgcccttcagtgttttgtcatgatattggaaataagctttcataataataatttgaagcacatgtaatcgccctttatttattaaagaatcttacgattttgtgttcctaaactttgaagatcatgtttgggaagtttaaaatcagtattgtcttttgtgtacctattagtgtttatattttgtaggtatctcttccaaatgcacaatgaaggagttctcatcaacagcacaaggcaatacagaagtgatccacacagggacattgcaaagacatgaacgtcatcacattggagatttttccttccaggaaattgagaaagatattcataactttgagtttcagtggcaagaagatgaaagaaatggccatgaagcacccatgacaaaaatcaaaaaattgatgggtagtacagagcaatatgatcacaggcatgctggaaacaagcctattaaatatcagcttggatcaagctttcattcacatctgtctgaactccacatatttcagcccaaagggaaaattaataatcaagtggagaagtctatcaacgatgcttcctcggtttcaacagcccaaagaatttcttgtaggcccaaaacccatatatctaataactatggggataattttctgaattattcattactcacacaaagacaggaagtacgcatgagagaaaaatctttccaatgtattgagagtggcaaagcctttaattatagctcactcttaaggaaacatcagattattcatctaggagagaaacaatataaatgtgatgtatgtgacaaggtctttattcggaagcgataccttgcacgccatcgtagatgtcacactggtgagaaaccttacaagtgtaatgagtgtggcaagtccttcagtcagatgtcatcccttacatatcatcatcgacttcatactggagagaaaccttacaaatgtgaagaatgtgacaaagctttcagacacaattcagcccttcaaagacataggagaattcatactggagagaaaccacataagtgtaatgagtgtggcaagacctttagtcagaagtcataccttgcatgccatcgtagcattcatactggaaagaaaccttacgaatgtgaagaatgtgacaaagctttcagtttcaaatcaaaccttgaaagtcataggataactcatactggagagaaaccatacaagtgtaatgattgtggcaagaccttcagtcatatgtcaacccttacatgccatcgtagacttcatactggagagaaaccttacaagtgtgaagaatgtgatgaagctttccgtttcaaatcaagtcttgaaagacataggagaattcataatggagagaaactgtacaaatgtaatgagtgtggcaagaccttcagtcaggagttatcccttacctgccattgtagacttcatagtggagagaaaccttgcaagtgtggagaatgtgacaaggcttacagtttcaaataaaatcttgaaatacgtcagaaaattcatactggagagaaatgttataagtgtaatgattgtggcaagatcttcagtcatacgtcatccattgtataccatcataaatttcatagtggagagaaaccttacaaatgtgaagaatgtgatgaagctttcagtttcaaatcaaaccttgaaagacataggagaattcacactggtgagaaaccttacaggtgtaataggtgtggcaagaccttcagtcatacatcatcccttacatgccatcatagacttcatactggagagaaaccttacaaatgtgaagaatgtgatgaaactttcagatacaaatcaaatcttgaaagacataggagaattcataatggagagaaaccgtacaagtgtaatgagtgtggcaagaccttcagtcagaagtcatgccttacacgccatcatagacttcatactggaaataaatcttataagtgtaatgagtgtggcaagaccttcagtaaggagttaacacatgccatcatagacgtcatactggagagaaaccttagaagtgcaatgagtgtggcaaaacctttcataggcagtcagcgcttatttaccatcaagcaatccatggcagagggaaactttacaaatgtaatgattgtcaccacgtcttcagtaatgctacaactattgcaaatcattggagaatccataataaagagagaccttacaagtgtgataaatgtgacaaatttttcagacatcgttcataccttgcagttcacgggcgaactcatgctggagagaaaccttacaaatgtgaagaatgtgataaagctttcagattcaaatcaaaccttgaaagtcataggagaattcatactagagagaaaccttacaagtgtaatgagtgtggtaagatgttcagtcaaaattcggcccttgtaattcataaggcaattcatactggagagaaaccttacaagtgtaatgaatgtggcaaggtttttaatcgcaaagcaaagcttgcatgtcatcatagacttcatactggagagaacgcttgcaagtgtaataaatgtggcgaggtttttaatcaacaagcacaccttgcacgtcatcatagaactcatactggagagaaacattacaagtgtaatgagtgtggcaagacctactctcacaattcagtccttgtaattcataagacaattcacactggggagaaaccttacaagtgtaatgagtgtggcaaaaccttccatcacaattcagtccttgtaattcataaaacaattcatactggagagaaacaagcgtaatgaatgtggcgaggttttcaatcaacaagcacacgttgcacgtcatcatagaattcatactggagagaaaccttagaaatgtgaagaatgtgacaaagtttacagtcgcaaatcaaacctcgaaagacaggagaattcatactggagagaaaccataaaaatgtaagagtttttgacaaggctttcggacgtgattcacacctggcacaacatcccagagttcacactggagagaaaccttacaagtgtaatgagtgtgtcaaagcctttagtgggcagtcaacacttattcaccatcaggcaatccgtagtgtagggaaacttgactaacgtaatgattctcacaacgtcttcagtaatgctacaaccattgtaaatcactggagaagccataatgaagagagatcttacaaatgtaataattgtggcaaatttttcagacatcgttcatacattgccgttcattggcgaactcatgctggagagaaatcttacaatgtcatgattgtggcaaggtcttcagtcaagcttcatcttttgcaaaacaggagaattcatacaggagagaaacctcacaagtgtgatgatcgtggcaaagcctttacttcacattctcacctcattagacatcagagaatccatactggacagaaatcttacaaatgtcatcagtgtggcaaggtcttcagtccgacttcactccttgcagaatatcagaaaattcatttttcaggtaattgttcccaatgcaatgaatatagcaaaccatcaagcattgattgacattagagtcagttcagcattgacttgagtttgagttgacttaacattgagttcaagccttaattgacattaaagtgtttatgttaagaggactgggctgtgtggcatggctcacgcctgtaatcccagcactttggtaggccaaggtgggtaaatcacttgaggtcaggagtttgagatcagcctggacaacagacctgagccacttttcccagcctgttttttgtttctttaacaaaaactgatagggatttttatgggtatcgtattgaatctagattacattgggttatataatcatttaacatattaatttttccaaaccatcaatatgggttgtgtctctatatatgtttttaatcattttgatcaatttttgttgatttcaaggtacaaacgtctcacctttttacgtttattcctaagtatttcttattttaagttctccagcaaatggaagtgtgttaaaattttcttttaaaattgtttattattaaaatatggaaattcaactaatttttggtgctgatactgtattgtgcaaatccactgaatatgtttgttagttccagtactattttggttgagtctgtgattttctacacagaaggtcatgtcgtctacaaacaaatgtaattttacttctttctttctgatttggatgagtttgatttcttttgctatttaattgctctggctaggacaggcagtattgattgaatagaaggggtgagagcattcttgcatcatgtgagatcgtacaggaaagcattccattttccctgcttggttatttactcatttgtcatttcatggatgttctttctattgttgaggtaaatttccttttctattttgtttaggatttctatgatgactggattttgaattttgtggaacgctttttctccatctactaaggtgatgtggttttaatctttcattctgttctagtggtatataacattgatttgcttgaatatgttgaaccatccttgcatcccagaaataactggcacttgaatatctacatttttttaatatcctcttgaatacagttttctaggacaagggatcttcaagaagttctggaaaaatacatattatgagaaaattgtgcatgaatttcacaatttttgcaccaaaataaactagtgctagtctgttataacatgtctgaacaggctctagtttgatgccctcaaaaggataagacatgagtataaaaagagactccatcaaagcaatataaattctgatgaaatttaaacaagaagaaacattaaatttatgatgagaccagatgcagtggctcaggcctgtaatcccagcattttcagaggctgagacaggtgggccacatgagcccaggtattcaagaccagcctgggaaacgtggggaaatccccttttctacaaaaaatacaaaaattagctgggcatggtggcacatgcctgccgtctcagttattgtgaagtctgtgcagggaggatggcatgaacctgggaggtcaagattgcagtgagctatgatcatgccactgcactccagcatgggtgatggagagagatactgtcttaaaaaaagaatacttgtggtaacgtttgggtagaggaataatgaaatcattgatgctttataaaaaggttatggggacaatgcccaaaagaaataaacagtttgtaaacggataacttattttgagttagggcaagacaatgttgacagtgatgcatgaagcagcaggcagaccttccacatcatttttacagaaaaaaaaattaatcttgttcatgctgcaatgaagaggactgacagcaaacagcagaaacatagtcagaatttagagaacagcctggttaacatggtgaaacaccatctctagtaaaaatacaaaaattagctcagcatggtggcatgcgcctgtaatcccagctactcaggaggctgaggcaggggaatctcttgaacccaggaggtggaggatgcagtgaactgagatggcaacattacactctagcctgagcaacaagagcaaaactccatctcaaaaaaaaaaaaattgtcaagttccttctcttccattctttgccatcgtggtgtgtgcttgactctgcttcttgccacatcttctcagaagactttcaggattaagcgattcctggccaagaaacaaaagcaaaaccatcccactcccctgtggattcagatcaaaactggtaataaaatcaggtacgactccaaaaggagacattggagaagaaccaagctgggtctataaggaattgcatgtgagatggcacacatatttatgctgtctgagcatcacaatcacgttaccatatcaagctgaaaatgtcaccactatctggacagttggacatgttttattgggaatatgttttttctctgtaaatttgttataaacgcattggttggctgtgttcagtaataaacgtgagacttttcatttcaaaacaaaagtcaaatgatgtaattccatagagtaccttaatttctgttttttgttttgttttgttttgttttgagatcgagactccactgggttcagtggatcacacctgtggtcctgccactttgggaggcttaggtgggaggattggttgagaccaggagtctcctgggaatcttctcgtctcccctaacccagttaatgacagacctttgtcctttctgttatggaaaagtctatagaaaacaatatcagtgtgtcaaagcattatgtctgtcacaagctcatgaaaggaaaataaaaatgactaagccagagagaaaagtcaagctgggaactgtatcagataaacctacctcccattttgtttctaaacgagatagctacaaagactaaaagaaagctacatacagactgggcgcagtggctcatgcctctaatcctagcactttgggaggccgaggtgggcaaaccacagtacgtcaggagttccagaccagcctgactaatatggagaaaccctgtctctactaaaactgcaaaattagccgggcatggtggcgcatgcctgtaatcccagctactcaggaggctgaggcaggagaatcgcttgaacccaggaggcagaggttgtggtgagccgagattgcgctattgcactccagcctgggcaacaagagtgaaattccatgtcaaaacaaaacaaagctatagactcccctcacaaactggggacctcgagatctccaccctaaaatagttcttttgaatttcccactgccaatgtaaactaatagcttatcttcacaggtgtgggacagaacccatccctctgcacacctgagatgaatgcctatctgattgcttcccctgtcctatttatgtaaaaatgtagagtcactgaggcagtctaaggcataagtgactattcctccaccccctctcacatgtaaattgtgtattcagggccaggcatggtggtggctcacgcctgtaatcccagcactttgggaggccgaggtgggtggatcctgaggtcaggagatcgagaccatcctggcaaacatgaacacggtaaaaccctgtctctactgaaaatacaaaaaattagccaggtgtggtggtggaagcctgtagtccagctactcgggaggctgaggcaggagaatggcgtgaacccaggaggcagagcttgcagtgagtggagatcgggccactgcactccagcctgggtgacagagcgagactctgtcacggaaaaaaaaaaaaaaattgtgtattcagtgaaaggctgatgaaagactcaatgtgatcatttgttatctacgtgtgacccagaagccccccaattgcagttattccacctttccagaccaaaccaatgtataacttacatgttttgattgatgtattatgtctccctaaaatgtgtaaaaccaaactgcagcctgaacaccttgggcacacgttgtcaggacctcctgaggctgtgtcacgggggcatttttaaccttggcaaaatagatttctaaattgattgagacctagtagatacttttggttcacaagctcatgaacacagaagaaatcaaaatagaataagaaaaaaatgaggtgtagtggaaagcacaatatcagttccaaaatttgaactccttcatatttattcaacatagggagatgctcttcaactttgggtggttagattccatttgtgaaagatacatatttctaatgtagcaggatgagtcacagacaaaactcctcagacaccagattaaagaaggaagaggttttttattcagctgggagtgtcagcagactcgcgtcttaagagccaagctccccaaaaaagaaattcctagcccttttaagggcttacagctctaaggggtctacgtgaaaaggtcataatcaagtaagtgtgaggaatgtgactggaggctacatacatcagctaacagaacagaaagttttacagtactttctcatacaatgtctgaaatttacagataacaccagtagttttggtcaggggttaatattattattattattattattttcaccaccagggtcaggtggtggcgccaaggtcgtctagctatttatcttagttctgcttctttccaactttttgctttctcccttttctcctgtcttataaaccaggcaaaaggggaggttggggagaagctgggaaggacaacaggagaagtggtggcctcattccatactaatatttgattaaataacccattctatgtaattttagccaatttaaatggcaaataataaatgatcaattatatacatacataaaacttcctaatatttcacttagtattgctattactatgttcttgggacagaagttcagcctgtcagatacaagagagtggtgtctccataactgtgcttagaactccgtgctgcatgaatggataaactgttaagcaggaacctaggaaagctagaatgacaaagttcaagtttattaaaactagcaaaacatattccttactgctcatgcatgagtcacggtcataagatgtttacagttaaggaaagcagcttcatgatacctgcaaggacgaactcctacagaaacacaatgtccaagataacctaatatccgatgacaatgtatgcttttaagaagcaggctggtcgcaaactcctgacctcaggtgatctgcccacctcagccttccaaagttctgtcattacaggcttgggccactgtgcccggccaaagatagctttaaatcaacaaagtaataagttttgtcacactgtcagctcaccggcaggtagacataacttagcttttacttaggcccctatgtaagaaaaacttcatgaggaggcactcccccagccttctgaggacaccctactgtgtaactggtagctttcaataaactctcctcactgcattcggacacttgccttgaattctttactacgcaagatccaagaatgttaacatggggtgtagactgtgacctcgttttaggcaacaaaatgactgaacgttatacaaaaacaacaattgatccaattctcataaaagtaggaattttgtagtcctcatccagcatgccaagcaaagatcgacactgtggagtcaccgctcatgagaacaaaggggctgacagctgggaaacatgggtagatgagggtgaggcgctcagcagctgccaactgggattattgaaaagggcaataggatcttggaagggggagaacacagtataaagcgacacaaatgctgcagaggcactggccctgcaagcttcacatgggggagttggaaatccctgacaactgcacaatcttgcgtgtggatttcaacatcccgaagcaaccagattcctgctgtggctagactcggggataaggtgctgcgaaagacaggtttgaagcagaaagaccaagaaaacactcatctgagccagccccgggcgctgcagaacaaccatgggcaggccctccaccccgtctgggcggattctggacagtcggcggtgacccggagggagaaggaaaggtcgtcgagggggcggagcctgaaccggtgcttgggcggggccagaaggtggaggccgctttggaagccgggccaggttagagggtgggggtgggacctggaacgggactggggcggggcaagagggaggaggctgccttggggccgcccaggacagcgagaagggctggggccagagggttatcattttcggggcggggtctgaaaggggttttgttctgaagggcggggcctgaaggggggcggatccgggttctttcctcagctgggccatggctgtcgcctgctgtcatactcttgccctccaggactgggtcctccgggttctgattggtggattgtttctgatgtaccgtgatattacccctaatattacatgtagtgagccacctgtaccgaacgcttaatcgtttttcctcttaagttgaaaatagttttaatgcaaagagcctttttggagcaggtagagtcatgcatccttcaggcggggcacgctcccctcagtctgaagcagggcggggtagaggggcagggacctcggtaaaggactggagtagggcgctggttgcagctgggactgacaacgagaaggcttattaaactaagcaggatcctgggttgagtggataatgggaactgaaaggtgacatgcaaaactgcctattacacacaggaggtgaaggacaattcgtatttcatggaaataaagtcagggcccagagtagtggctcacatctgtaatcccagtgtgtctggaattggttccctctggtgggttcttggtctcgctgactttaagagtaaagccacagagcctcgcggtgagtgttacagttcttaaagatggcatgtccagagtttgttccttcagatgttcagatgtgtccggggttttttccttctggtgggttgtggtctcgcttgacttcaggattgaagcggcagacctttgcagcgagtgttacagctcttgaaactgtcgcgtctggggttgttttttcctcctggtgtgttcgtggtcttgctgacttcaggagtgaagctgcagaccttcgcagtaatttggccctgcccatgtcctgctaatgggtccattttacagagtgctgattggtccatttttacagagtgctgattggtgattttcaaacctttagctagacacagagcactgataggtgcatttttacagagtgctgattggtgcgtttacaaacttttagctagacacagaggcctgattggtgtgtttacaatcctttagctagtcagagaagttctccaagtccccacccgacccagaagcccagccggcttaacctctcaccagcactttgagaggcagaggtgggaggatctcttgagccaaggagttcaagatcagcctgggcaacatgatgagacctcgtctctactaaaaaaaaaaacaaaacagcccggtgtggtggtgcacgcctgtggccccagctgctcggggcacttaggtgggaggatcacttgagccagggagttggaagctgcagtgccctgatctcgccaccacactctagcttcagtgacagagctagaccctgtctcaaacaaacacgtaaataaatgagaggtgtaattcctcccttgaaaataaaggaagagattttctttcctttcatctcttttcttaggacactgatttcgaaagtttgcaaatggattttctctgtcttctgagttttttttttttttttttttcagatggagttttcctctagttgtttaggatggagtgcaattgcacgatcttggctcaccgcaacctccgactcccgggtacaagcctggttttgaactcctgacctcaagtgatttgcccgccttggcctctcaatgtgctgggattacaggcatgagccaccgcgcctggtctgaagtggtattttttagaaacgaactaaaccttttttcagcttaatgacccagggatgtatttctgaaggacttgggagctctctttgaaaggcaaaatacaagggagacagtacctgtatctcagtaggaaattaagtaattcaaacatcaaataattccaatttaaagctatggcctttaaataattctgagcctttgaggagagaggccatttctcttactgtctcctgtctctgaagaggaggaagtaaaagctgaaaaacaacaggaatgaattcagtgacaagaccagccagcgccactgatgaccaggcctgaggttaaaagattaactgccccccaactctaaccacatgtgctcttaatctgtcatgaccttttcccgtggaaccccttagagctgtaagcccttaaaagggccaggaactctttcttcggggggttcaattcttgagaggcaggtctgccgacactcccggccaaacaaagtcttcaaagagctcggttcttgagacgtgagttggccgatgctcccggctgaataaagccacttctttctttaaccgggtgtctgagggcttttatccgcggctgctcctgctacaccttgagaggaatgtgctcatgcaacctgagtccagcggaacgcaggcgtaacttctacgagttttcctggctggctgcggtggcttatgcctgtaatcccagcacattgggaggtcaaggcgggcagatcacttgaggtcagaagttcggaaccagcctggccaacatggtaaaacccactctctactaaaaatgcaaaacaaaaggcgaggcgcggtggctcacgcctgtaatcccagcattttggaaggctgaggcgggcggatcacaaggtcaggagtttgagaccagcctgcccaacatggcgaaaccctgtcactactaaaaatacaaaatttagcggctgggccaggagaatcgcttgaacccgggaggtggaggttgcagtgagcaggtgagatcgtgtcactgcactccagcctaggcaacagagcgagactctgtctcaaacaaacaaacaaaaaattagacaggcatggtggcgtgtgcctgtaatcccagctacttgggaggctgaggcaggagaactgcttgaatccaagaggtggaggttgcagtgagccgagatcgccccactgcactccagcctgggcgagtcttgcccttatttacaggaaaagagttctcctgtaaataactaggaagactaagcagccccagagataaggcctcctgggatcattgtccctttttatggagtgataacataaccttccttgaagtgtatgactccgtcaccaatcaacttgctgcaacctatgcactggtcttgaatggaaaatgtgttgattctcctaaaacttctctgtctttccctgtgtgtgaaaccttaacgtctctacttgggaacgttgatcccattcattaggagttgatgtttgccggtggctatcctcatgctttgtgttcagataaactctatacttaatcataaattctaaatgttattatttactgctgacatcagtttctgtcacattgtaggagcctcaccagagagggcacctgtagccatgttgtaaaactcacacttgtcaaaaagacatgggttagtgtttctccccctccctctgcatgaagctaattagctgacacagatggtcacctccattaccaactagagccaggatgaactatgtgtgaccaagggtgttgtcaagtccttttccctgaggactgattagtgtttatcttgaaaacatgtacttaatgggttgtatagaactgtgaagtgtctttctcttttttcaacctcttagctctttgcctctatttcccatcacattctggtctaaggcttacttattaataaaatggtgtttatttctttctctattatcgtcatggagatgttttgtcatttgggggaagatttttttgtttcgttttcaattgtattttcttaacaattagaaagtgaagtaaaaagtatttggccaggcgcggtggctcccgcctgtgatcccagcactttgaggaggcccaggcaggtggatcccttaaagtcaagagtttgagaccacactggccaacatggtgaaactcgtctacaaaaatacaaaaattagccgggcatggtggcacgcgcctgtaattgcagatactctggaggctgaggcaggggaatcgctgaaacccaggaggcagaggctgcagtgagccgagatcccatcacggcactctagcctgggcgacagagaaatactctgtctcaaaacaaaagaaataagtaaataaataaaggaataaatctcttccaaaaatgtgctgaggcaactaactggatatccacatggaaaagaatactgttagatccctatctcacacaatcaaactcttattttaaaacgtttaaaaaaaaaggaaaaaaaagagagagtgacgaggaagggagccctgcgggagggggtgttacattgtcgcccaggctggcctggacccccaggctcagcaatcctcccgccgctgcttcctgagtagctgggacctcagtctcccgcgcccgcgcccacatccctgctgtgtttatccagaaggtggtgacctcactcctcgctggcctgagcattccgtcccacatcccaggcggtggccctagggaagtctctgcagctgagcacagggtggactctccctcccaagtgaatggagactggaaagggagaggatttctattctgttttgtgggctgtcagcatgaaatcgtacgttccatccaggcagggctttgcattttacattccagtttgcatccccgttccagacaattccagggcttttgaatcatgcctcagccttcctggccggtctcgcctccaaaacccgaaaactgaggccctgggagccaggctgagagactcacaggtcccgccacagccccgccctctgtcggttctaaagggtaaagtctctctgccccgcccctacctcgcccaagcccgcccacctcctcgcgggtcccgcccaggcctggcttctttcctgcgcgcgcagcttcgcgcagacccggaagcggacggcgtggagtgactatcccaccgccgcgggtgagtttcgctctgttttgtattaagtctgtgcttcccaggtccctggcgcttctgtacctggggcgtggggtctccactaacctggaaattctcagccgtcttccttcacccagagcaagttgagacgaccccgtgagagtccgggggtcgcttccttttgggtttaaggtccccctgaggctggtcccgtcccgggtgtttctgctatagggcaatgtatacactttctatcacgtagttttcctgctctgaaactttttctgactcctcccgtcccgcgctttttaaagtcctcacccgagaggtgaattccctccctgagcgcctcccagtctcgccctcgttggcagctggacgcagcgcggcggccccagccccaaggaggccgcgtcctctgtctggtcctgggatcctgcagaccccacccttgtcttaaggcgccgtggcgccgccgcctccctccttttgcgggccctactgctccccaggttcgcctccacagtcactgctttccctgagcccgagttagggaggtgcccggggcctgtcctgtgacacggggtgttcttgcctgcccagctccagcccctggaaaatgcgctcccccgggatgcaggcgttttgctccaaaccctcctgtgtcttatccaaagcctccggtgcttgtgtaggctaaagggatcaggagacagacgtagagcagtagaaaacctgagacagaaaagaagaataaaaaagactcataacagatggcaaagtagaggatgggtgagggatttgccagacacagcaaatgtgggggaaaaaaaaaaaaaggaggagaaaagcaactggagaaatgtagagaaaaggtagatgtacagagagatgaaggacagagagcaaggtagggagagggacagcaaagagggaggctcatcagagtgagggagaggaggagggatttggagccagggcagacagagcagagtggtgctggtggcaaggagaacagagggagaagcacagcagggaggacacctggggatctggggtgctagagagtggggatgagggtataacagggaagagagaatgtaacagggagagcagaggaggcgcagagatggtgttgcgggaaactaagtactagagagaccggtatgcgggagacagaacgatgtttatttaaggtacgcaccggctcagtggatttacatctaaaaagctgagcatttcaacaaagacagagtggggtttttataagcaggcttacagaagcaaaataaaagcagttaatcatgtaatgattggtcacataatctatagcatagcataacttgtggccttgcatagctggtggtcttgtagctgcattgaaagaaaaacaagaacagctaaatacagactttttttttcttcactcttgttctaaagtggggttttctggagctcattcctttggcttcagctgcacaaaaagcgttatcttataactgtccttgaagtgagcttgctaggcagaggaaaacttgttcttcttttctttttaacccttgccttgcctgttagttttttggagtgaatgaatgcatattgattttttaaatttctgcctcagttttctccctttgctgctttttataaataaggttttaatagaaagcaccactattactggattcttcatgaaagagcaggttttcttctttaggcacaggctgatatttatatggagctattagctgagtggtagtctgcctagtcacaattgcttctatagttgattgaacgttcttaacaaggagaggtgaggtaagggagtattaaaccaattcttagtatttctagaaccactcctgttaaggttttgaatcgactgaaggaggaaaaccagcctctaaagagggactcgggagtctactttgtctaagtctggactggaacatgggataatttttttattcttgcagttacttctataacagccttcctattgtcattgatttctaggcagcaattagttagattaaactttctacatactcctccttcctaggctaggaggtagtcgaaagctaatctattttggtagatggcatttctcatttttgtggcttgctgggccagtaagtctaatgcatttgctgtttcattagtgatgattccaagtactgcttgcaactttatgatgcggttaagcgtgtaaacttaagtgtgcccggctcaatttttgaatttttagtagagacagggtttcaccatgttggccaggctggtctcgaactcctgagctcaagcgatcctcacacctcagcctcctaagtaactgggaccacagacacacagacgtgcacaaccatgcctggctaagtttttgtacttttggtagagatggggtttcaccacgttgcccaggctggtctcaaacctgagctcaagagatctacgcacctcggcctcccagagtgctgggatgacaggcatgagccaccgcacccagcctttgcatgaggtttggtcaggcctgggtctgtgccctaaaggggagctcatcccaccccagctccccactgctgcagcgtgtgtgtgggcttctccgggaggggagtgggagttttcctgtaggagtttattgtccctggtgtggtcggcagcataggggaccgtatgtcctcaggatgaggtctcctttgtatgtgttgttgtgttacagggaggggatatgttgattctgagcaataaacaacatatttctaacattcaggattgacttctaaagactcttggtatgtgaggaagaaacctggaagaggaagaggaaagcaaaggagtcagggatggctcttcctcaggtgagatgatattcttggtggattgttctgtctccttcttttcagaaatgctgaccttggagtttggaatcttctctgagtctgaagcatcttgcctgacaggtttgctcgcactcacccatgccttccttcattccctcttatcttgcttagattccatctcccatgatccagtgacatgaacttgggaagaggctgcactgggcatggtcctgggaagggctcacacccagacatggatggagatggggtgagggtcccatggtgtcagtgctgttgggcagcagggattgttcaggggctacatctggatgctctgtcagctctctgtagaccaggattagagcaactgccaatggaagtcatgtattcatgtgcacaaagtatgtggtaaattctagaaaaggtgaccaatatggagcaattttttctgcctgattttatactacatttttaggtaattgagtgagttactgtgtttctgactccaactatcttactaattagaatggaaagttcatacacagacatgaatgatacaagatgttttattccgtctttattttaagaataggaaatcaacctgaataatagcaggagattcattcaaccattcttagcacattacgctcatggagactgtggggttcctgtggagaggcttgtgaaacaggtgttttggttataatttttattatcagtactattatattatgataatattattatatttcacatatatgaagtcttgctttgtcgcccaggctgaagtgcagtggcatgatcttggctcacagcaacctccaccttccgggttcaagtgattctcctgcctcagcctcccgagtagctgggattataggtgtgcaccaccacgcccagctaattttgttgtatttttattagtgacgagtatcaccatgttggccaggctggtctcaaactactgacttcaggtgatctgcctgcctcagcctcctggagtgctgggattacaggtataagccaccatgcccagccccaatgattattattaaatatatatttttcttttttttaaaattattattatactttaagttttagggtacatgtgcacaatgtgcaggttagttacatatgtatacatgtgccatattggtgtgctgcacccattaactcatcatttagcattaggtatatctcctaatgctatccctcccccctcccccaccccacaacagtccccaaaatatatatttttctatttaaacatcacatagtgaatatatttgttttgtggtaaaactccaagcaaagctgcagcttagaccctttgccatcaggcatctcccttccctgttacatcctccacccttcttccaaactcactggggagtcaccactgtcagttctgtgccaggcgtcagagcaagtctcatacacatgtatttctgcatcatatgagactttagaaaaaattattcaataaattgaaaaaaaaataacttttttacaaaaattagcctggcgtgatggcacgtgcccctaatcccagctattcaggaagctgaggcaggagaatcacttgaacctgggaagcagacattgcagtgagctgagattgtgccactgcaccccagcctgggcacagatcaagactccatctcaaaaaaaaaaaaaaatttttacgtttggggccatatgttccggtttcttacataggtaaactagggtcatcggggtttgttgttcaggttatttcatcactctggtgttaagtcccgtacccaatagttattttttatttatttatttttttgagactgagttttgctctttttgtccaggctggagcataatggcatgatctcaactcactgcaacctctgcctcccgggttcaagtgattctcctgcctcagcctcctgagtagctgaaattacaggggcctgctaccatgccttgataatttttgtatttttagtagagacagggtttcaccatgtgggccaggctgatcttgaactcctgacatttgatccacctgcctcagccactcaaagtggtgggattacaggcatgagccaccgcatctggcccccagtagttattttttctagtcttctccttcctcccaccctccaccctcaagtagacgccagtgtctgttgttttctttgtgctccagtaaatattttacttcgatatttgatcctgctggttgtgaaaatttacatgttctcatgttagtaaacgtggatagcttgctctttgacatctgcattggaaattggctgaatgacaaatgggcctttgcaacttttccctgtataaagagtgccatagtggctgcctctgtgcacacccgcgttactacagatatctcacgattcctccaggtcaggcagttgaaagggtgattacttcctctaggatgaggcatttcctgttttcttagatctgacaagattcccccctgtccccaactgccaatgtatccttttgcagcaagatgagattcctcttcagttcaacaaaacttgctactttttatatttttaaagcctttatatgtatacacacccacacacacaatatacacatacacatatacatatacatacatatacacatgcacaaatatatatattttgaacaacttttccattttgaaaatctggggaaaatgacaaccctttgtattaacatctagttttttgtgagtctgtgtaggtttcattatttgttgacatatatatatatatatatatacacacatacataaaatggattttcatactttgagtaatctagttttcatatattttcttttgttttgagactgggtcttactgtgttgcccaggctggagcacagtggcacgatcttagctcactgaaacctccaccctgaggctcaagccatcttcctacctcagggtcccaagtagctgggaaccacaggtgcctgccaccatgcctcgctaattcgctaattttttttttttttggagatggagtatctgttgcccagactgtagtgcagtggtgcgatttcggatcattgcaacctctgcctcctgggatcaagcaattctcctgcatcagcctcccaggtagctgggataacaggcatgtgccactgcacccagccagattttagtttctcatctttcactgtgaactgtgaatgtcatctctgaagacatcattcatactctgcctcatctagatactgaatgtcacttggtgtgtcaataaatgtttctgggccgggcactgtgtctgacgcctgtaatcccagcactttgggaggccgaggtgggcggatcacgagatcaggagatcaagacaatcctggctaacacggtgaaaccccgtctctactaaaaatacaaaaaattagctgggcgtggtggtgggcgcctgtagtcccagctactcgggaggctgaggcaggagaatggcgtgaaccggggaggcggagcttgcagtgagccgagatcgcgccactgtactccagcctgggcgacagagcgagactccgtctcaaaaaaataaaaataaaaaaaaaaacgtttctgggccgggcacggtggatcatgcatgtaattccagcactttgagaggctgagtcaggcagatcaggaggtcaggagtttgagaccaaactgggcaatatggtgaaaccccgtttctgctaaaaatacaaaaattaactggtcgtggtggcacgtgcctataatttcagctattcaggaggctaaggcaggagaatcgtttgatcctgggacttggaggttgcattgagcagagactgtgccattgcactccaggctgggcaacagagtgagactccacctttaaaaaaaaaaaaaagaactttagtaaacacaactgggaagacaaaatgcggtgaaaaatcccttactcagatttgttagaacattcactgcatttaaatccatgccttcacctctctcttcttctcattttctgtaaagataagaactcctcccataaccatttggttaaaatgtgttttcatttcagggtctattgacattcagggatgtggccatagaattctctcaggaggagtggaaatgcctggaccctgctcagaggactctatacagggacgtgatgctggagaattataggaacctggtctccctgggtgaggatgacttccctcctggggatgtgcccttgcgtatctttgtattttctctccttttttttttttttttttttttttttgagatggagtctcgctctgtcgcccaggctggagtgctgtggcatgatctcggctcacggccagctccgcctcccgggttcacgccattctcctacttcagcctcccaagtagctgggactacaggcacccaccaacatgcctggctaattttttgtactattttttactagagacggagtttcaccatgttagccaggatggccttgaaatcctgacctcgtgatccacacacctcggcctcccaaagtgctgggactacaggcataagccaccgtgcccggcctatattttctcttgtttttagataaagtgtctctctctgtcagcccgggtggagtacaatggtgtgatcatggctcactgcaatcttgaattcctgggctcaagtgattgtcccacctgagcctcccctggtagctggtacaggtgcatgccaccatgtcgggcaacttttttagtttgttttttttccagacagggtcttgctgtgttgttgaaattcatcctgatctcctgggctccagagatcctccttagtctcccgagtagctgggattacaggtgccaaaccccatacctaattattggcttttattttaaaaatttttgcatatgtgcagctgggcatggtggctcacacctgtaatcccagcacttcgggaggctgaggtgggtggatcacgaggtcaggagatcaagaccaccctggccaacagggtgaaaccccctctctactaaaaatacaaaaattagccaggtgtggtggcacgtgcctgtaatccaggctgagacaacaaaatcacatgaacctgggagtcagaggttgcagtgagccaagattgccactgcactccagactggcgacagagcgggactctgtctcaaaaaaaaaaagaaaaaaaaatttcatatgtgtgtccttaaggctgagtctgtgagtctcttgtagacaacatgtagttgattcctgttgattcagccagtctttgccttctgagtgcagattaaatacttacagttgaagtattactgatggagaagaccttacccttgtgattctgttacatattatctgtatttattgtaggtttttttgttcttcatttctcatttactacttttgtgtttatttgcttttttgtgtagacatgctttgactcccttcttattgacttttgtttgtttgtttgtttatgatggagtcttactctgtccccaaggctacagttcaatggtacgatcttggctcaccgcagccggctccgcctttcaggctcaaacaatttttgtgccccagtggctcacgcctgtaatcccagcacttcgggaggccgaggcaggcaaatcacctgaggtcaggagttcaaaaccagcctgcctaacatggcgaaactccgtctctactaaaacacacaaattagccggacactgtggtgggcgcctgtaatcctgctactcaagagtctaatgcaggagagtcgcttgaaccctggaggtggaggttgaagtgagccgagattgtgccactgccctccagcctgggtgacagcacgagactctgtctcaaaaaaaaaaaaacaacaacaacaaaattccataacctgcaaaagccactctttctctactagaactctgtatttatgtcagaattatttctctgtatgttgcattcgcattaacatatatgtagtgttttttcatgcttttttcttctaaataacagaaaaaaaagttgaattatctagagaaggtatacttacaccagtttctgtatgtgtcctgttatttgcctattcatttatttatttctttgttgatgagatgaagttttgttcttgtcgcccatgctggagtgcaatggcacaatctcgggtcactccaacctccaactcccaggttcaagtgattctcctgcctcagtgtcctgagtagctgggattacaggcatgtgccaccacacctagctaattttgtattttagtagacacaggctttctcctttttggtcaggctggtctcgaacccctgccctaaagtgatccaccaacctcggcctcctaaactactgggattataggtgtgaaccaccgtgcccggcctgtctttttatttacctttactggagaactttatatatatttgtgggttggagatactctttagaattctttcatttctttctttttttctttttaagacggagtctcggtctgtcacccaggctggagtgcggtggtgcgatcttggctaactgcagcctctgcctcccaggttcaagtgattttcctgcttcagtctcccaagtagctgggactacaggcacatgccaccacacctggctaatgtgtgtgtgtgtgtgtgtttgtgtagaaatggggtttcaccctgttagccagtatgttcttcatctcctgacctcgtgatcctcctgcctcagcctcccaaagtgctgggattacaggcgtgaaccaccatgcctggccagcctcaaagtttttaaaacacgtaattgctatagatggcttcaggtattgcaagatttatggtacaggctctaaacttcctttgtttaatcagatttgtcagccttcagtgatgttgatgatgagatgctcctgttcctgcctcagtcatttcactgtcagaaatagcttagactggccacccgaggtggctcacacctctaatcccaacagtttgggatgccaaggtgggcagatcgcttgaagtcaggagtttgagaccagtcttgccagcatggtgaaacctcaaatctactaaatacaagaatttggccgggcacggtggctcaagccagttatcccagcactttgggaggccgagaggggcagatcacctgaggtcaggagttcaagaccagcctggccaacatgttgaaaccccgtctctactaaaaatacaaaaattagctgagcgtggtggcgcaaggctgttatcccaagtacttgagaggccgaggcaggagaatcactagaacctgggaggtggaggttgcagtgagccaagattgccccactacactccagtccaggcaacaaagtaagactccgggctgaggtgggaaaatcatgccactacactccagcatgggtgatagtatgtgactcagtctcaaacacaaacaaaaagagaaatagcttaaactgggaggcttcagacacagaaatttatttctcatgaatttggaaagtgggaaatccaagagcaaggtgccagccaaattggttcctggtgagagcattcttcatggtttagcccagccatcttcctgccgtgtcctgacatggtggaaacaggaacaggcaacgagctctttaatatctctttttatgaaagcacaagtcctattcacgagtagtcaacacccatgaccaaattgtctcaaaggccccatctgcagaacatccttttggagaataagaactctgaacatggcttttggccaatatgaacattcagaccagggaggctgcatcatattgtttgtgtttttattgtatgatttgatttataaaatgttttcactgatctcagtttaaaaattttcccagtacacattctatgttttatattttgtgcatagtgaactagataattaataccaactatatatatatatatatatatatatatatatatatatatatatatataaaattgctgtattgcctggctgtttcataaatgtagttgtgacatcataattgcaccctctgacaccgttagtcaatttttttttttttttttttggagatgaaatctcactctgtcactcagctggagtgcacaggtgcaatctcggctcactacaacctccacctcctgggttcaaatgattctcctgcctcagccttccaagtagctgagattacaggcagccaccaccatgcccagctaatttttttgtatttttagtagagtggggatttcaccatgttggccaggctactcttgaactcctcacctcatgatctgcccacctcagcctcccaaagtgctgggattacagacctgagccaccgtgtccagccgttagtcaattcttattccttataatgctgtgtatttttttgacctcataagtcagaaggtagtgatcttaacatgtatttcagttcttatattgtctgctggtggcaagtagaagtcgtggcatttttcttaacagggaattgtttagaattttgcatgttgtataaatgtacttattatttgcttcctggttttatgggttacaatattttactaattaatttttatgattgtacatgaggcttttcggtatgtggtatgcaatataactgacacagtccactagttaatgtcacacagtgccaccggatgctgtggctcacgcctgcaatcccaggactttgggaggctgaggtggctggatcacttgaggtcataagttcgaggccagcctggccaacatgttgaaaccctatctctactaaaaatacaaaaattagccaaacgtggtagtgtgtgcgtgtaatcccaggtactcaggaggctgaggcaggagaatggcttgaacccaaaaggtggaggttgcagtgagctgagatcgggccattgaactccaggcggttgtgacagagtgaaacttcatctcaaaaatataaaaataaaaaatttgtttaaaaatgtcaaaatgtgccttttctgcaaggatataggtaattttatgacagttattcagaaaaacattgtattaacattttttttcaagatggaatctcactttgtcacccaggctgaagtacagtggtgcaatctcagctcactgcaacctttgcctcttgggttcaaacgattcttgtgcctcgtgagtcccatgagtacgtgggactaaaaatttgggactaaaaaagattaaaaattacattttgtaatcttttcttatcttctcagtgctatgattgtttgacaatacagaatttccattgattttggttatccttacataatcttgttgtggattattttccaacacagtacatcatgtggtcctttagcatctatttgtatacagtaaatatgctgtaaatgtgaagaatatatacttttcattgatgtgacagtgatatgttttttacaaactgttagacactttagggtcacgatggaaaaatattccttactttaggctacacgtttttgtgccctgtcagtgttttgtcacgatattggaaatagacttccgtaaaaataatttgaagcacatgtaatcgccctttatttgttaaagaatcttatgcttttctgttcctaaactttgagggtcatgtttgcaaagtttaaaataagtattgttttttgtgtcatatttacacatttcagcattatttaccatctgtacttaatttgaaaccttttggtgtgtatactttttagatatctcttccaaatgcatgatgaaggagttctcgtcaacagcacaaggcaatagagaagtgttccatgcagggacatctcaaagacatgaaagtcatcacaatggagatttttgtttccaggatattgataaagatattcatgacattgagtttcagtggcaagaagatgaaagaaatggccatgaagcactcatgacaaaaatcaaaaagttgacaggtagtacagagcgatatgatcaaaattatgctggaaacaagcctgttaaatatcagcttggattcagctttcattcgcatctgcctgaactgcacatatttcacactgaagagaaaattgataatcaagttgtgaagtctatccacgatgcttccttggtttcaacagcccaaagaatttcttgtaggcctgaaacccatatttctaatgactatgggaataatttcctgaattcttcattattcacacaaaaacaggaagtacatatgagggaaaaatctttccaatgcaatgacagtggcaaagcctataattgtagctcactcttaaggaaacatcagttaatccatttaggagagaaacaatataaatgcgatatatgtggcaaggtctttaattcgaagcgatacgttgcacgccatcgtagatgtcacactggtgagaaaccttacaagtgtaatgagtgtggcaagaccttcagtcagacatattacctaacatgccatcgtagacttcatactggagagaaaccttacaaatgtgaagaatgtgacaaagctttccatttcaaatcaaagcttcaaatacataggagaattcatactggagagaaaccgtacaagtgtaatgagtgtggcaagacctttagtcagaagtcgtaccttacatgccatcgtaggcttcatactggagagaaaccttacaagtgtaatgagtgtggcaagacctttagtcggaagtcacattttacatgccatcatagagttcatactggagagaaaccttacaagtgtaatgagtgtagcaagacctttagtcacaagtcatctcttacataccatcgtagacttcatactgaagagaaaccttacaagtgtaatgagtgtggcaagaccttcaatcagcagttaacccttaacatttgtagacttcatagtggagagaaaccttacaaatgtgaagaatgtgacaaagcctacagtttcaaatcaaaccttgaaatacatcagaaaattcatactgaagagaatccttacaagtgtaatgagtgtggcaagaccttcagccggacgtcatcccttacataccatcatagacttcatactggacagaaaccttacaaatgtgaagattgtgatgaagctttcagtttcaaatcaaaccttgaaagacataggagaatttatactggagagaaactacacgtgtaatgagtgtggtaagaccttcaatcaggagttaacccttacatgccatcgtaggcttcatagtggagagaaaccttacaaatatgaagaacttgacaaagcttacaatttcaaatcaaaccttgaaatacatcagaaaattcgtactgaagagaatcttacaagtgtaatgagtgtggcaagaccttgagtcatacgtcatcttttgtgtaccatcataaacttcatagtggagagaccttacaaatgtgaagaatgtgaagaagctttctgtttcaaatccaaccttgaaagacataggagaattcacactggtgagaaaccttacaggtgtaatgagtgtggcaagaccttcagccagacctcatcccttacatgccattgtagacttcgtactggagagaaaccttacaaatgtgaagaatttgagttttccatttcaaatcaaaccttgaaagacaaaggagaattcatactggagagaaaccatacaagtgtaatgagtgtggcaagacctttagtcagaactcataccttacacgccatcgtagacttcatactggaggataccttacaaatgtaatgagtgtggcaagacctttagtcagaactcataccttacatgccatcatagacttcatactggagagataccttaaaagtgtagtgagtgtggcaagacctttagtctgaagtcataccttacgcaccatcgtagacttcatactggagaggtaccttacaaggataatgagtgtagaaaaacctttcatgggcagtcagcattttacaaatgtaatgattgtcaccaagtcttgagtaatgctacaactattgcaaatcattggagaatccataatgaagagagatcctacaagtgtgataaatgcagaataaatgcagaaaatttttcagacatccttcatacctttgcagttcatgggtgaagtcgtattagaaaccttacaaatgtgaagaatgtgatgaagctttcagattcaaatcaaaccttgatagtcatagaattcatactagagagaaaccttagcagtgtaatgaacgtggcaaggttttaaatcaaaaagcaaagcttgcacatcatcatagaattcatactggagataaacgttacaaatgtgaagcatgtgacaaagtttacagtcgcaaatcaagcctccaaagacaggagaattcatactggagagaaagcttacatatgtgaagaatgtcaccaagttttcagtcacactcaaaccttgaaagacacaggagaattcctactggagagatagcataaaaatgtaagagtttgtgacaaggctttcaggcataattcgcacctggcacaacatcctagaattcacattggagagaaagcttacaagtataatgaatgtgacaggtctttagtgggcagtcaacacttgtttaccatcaggcaatccatggtgtagggaaactttacttatgtaatgattgtcacaaagtcttcagttacactacaaccattgcgaatcattggagaatccataatgaagagagatcatactagtttaataaatttggcaaatttttcagacattgttcataacttgcagttcatcggcgaactcgtactggagagaaaccttacaaatgtcatgattgtgacaaggtctcagtcaagcttcattctatgcaaaacataggagaattcatacaggagagaaacctcacaagtgtgatgattgcggcaaagcctttaattcacattcacacctcactagacatcagagaatgcatactggacagaaatcttataaatgtcatcagtgtgccaaagtcttcagtctgagctcactccttgcaggatatcagaaaattcattttggagatagttgttccaaatacaatgtgtatagcaaaccatcaagcattaattgacactagagtcagttcagcattgacttgagtttgacttaacattgagttgaagccttaattgacattaaagtgtttatgttaagaggactgggccaggcacagtggctcacacctgtaatctgagcgctttgggaggccagcaccggtagatcacttgagttcaggagtttgaggtcagcctggccaacagacgtgagccattttcccagcctgttttttgtttctttaacaaaaactgatagggatttttttttttttttttgagatggagtttcactcttgttgcccaggctggactgcaatggagcgatcccagctcactacaacctccgcctcccaggttcaagcaattctcctgcctcagcctccagagtagctaggattacaggcatgagccaccacgcccagctaattttgtatttttagtagagatggggtttctccatgttggttaggctggtcttgaactcccagcctcagatgatccacccacctcggcctcccaaagtgctgggattacaggcgtgagccactgcgcccagccccagtgataaggatttttatgggtaccgtgttgaatctaaatcacattgggttatataatcatttaacaatattaatttttccaaaccataagtatgggttgtagctctatgtttctaatcattttgatcaatgtttgtagatttcaaggtaaaaacctctgacctttttacgtttatttctaagtatttcttactttaagttctccagccaatggaagtgttttaaaattttcttttaaagttgtttgttgttaaaagtatggaaattcaactaatttttggtgctgatactgtattgtgcaaatccactgaatatgttacttagttccagtagtattttggttgactctttgtgattttctgcacagaagatcatgtcgtctacaaacaaatataattttacttctttctttctgatttcgatgagtttgatttcttctgctatttaattgctctagctaggacagccagtattgattgaatagaaggggtgagagcactcttgcatcatgtgagatcctccaggaaaggcattccattttccctacttgattattcactcattggtcatttcatggatggtctttctattgtttaggtaaatttcctttctatctattttgtttaggatttctatgatgactggattttgaattttgtgaaatgctttttctccctctattaagatgatgtggttttcatctttcattctgttcaagtggcatatcacattgatttgcttgaatatgttgaaccatccttgcatcccagaaataagtggcacttgaatatctacaatcctttttacatcctcttgaatacagttttctagtacaagggatcttgatgaagttcatggaaaaatacatattatgagaaaattgtgcatgaatttcacagtttttgcaccaaattaaactggtacaagtctgttataacatgtctgaacaggctgtagttgaaggcactcagaaggataagacataagtttgaaaagagactctatcaaagtaaaataaattctgctaaaattgaaacaaaaagaaacatcaaatttatgatgagatcagatgcagtgtcaccacaccctgctaatttttgtatttttagtagagatggggtttcaccatattggccaggctggtcttgaactcgtgacctcgtgatccacccgcctcggcctcccaaagtgctgggattacaggcatgagccactgcacctggcccacatcagttttacaaaaaaaaattaaccttgtttgtgccgcaatgaagaggactgacaggtaacagcagaaatagtagtcaggagttcgagaacaggctggttaacatggtgaaaccccgtctctactaaaaatacaaaaattaactgggtatggtggcagatgccagtaatcccagttactgggaaggctgaagccagagaatcacttgaacctcagaggcagaggttgcagtgagccgagatggcgccattgcactccagcctgcgcaacaagagcgaaactttgtctcaaaaagaaaaaaaaaaagatgtcaagcctcttctcttcctctctccccttgtggtgtgtacttgactctgcctctcaccagatcttcttataagactttcaggattaagcgattcctggccaagaaacaaaagcaaaaccgttccattccccagtggattcagatcaaaactggtaataaaatcaggtacaactttaaaaggagacattggagaagaatcaagctgggtctataaggaattgcacgtgagatggcacacatatttatgctgtctgagcattacaatcatgttaccatatcaagctgaaaatgtcaccactatctggagagttggacatgttttattgggaatatattttttctctctgaatctgttaggaacatgttggttggctgggttcagtaataaatatgtgaggcttttcatttaaaaaaaaagtcaaatgatgtaattgcatagagtaccttagtttctgtattgctttttaggtttttttttttttttttttaactccactgggtcagtggatcacacctgtgatccttgcactttgggaggctgaggtgagaggattggctgagaccaggagtctcctgggaatcttctcgtctcctgtaacccagttcacgacagacccttggactttactatattggaaaaatctacataaaacaatgtcagtgtgtcaaagcattatgtctgtcacaagcttgtgaaaggaaaataaaaattactaagccaaagagaaaagtcaagctgggaactgcagcagacaaacctgccttccattttattcttaaacaagatagctagaaagacaaaaaaaaaaaaaaaaaagctacatagaggccgggcacggtggctcatgccgctaatcccaccacgttgggaggctgaggcgggcggatcacctgaggttgggactttgagaccagcctgactaacatggagatatcccgtctctactaaaaacacaaaacttggcaaggcatggtggcacatgcctgtcatcccagctactcgggagggtgaggcaggagaatcgcttgaacccaggaggcggaagttgcagtgagccgagatcgcgctactgcactccaacctggacgacagagtgagactccatctcaaaaaaaaaaaaaagaaacttgcagcaaacatggtatgatataaaaatcctttgccacaggggagaaccaggtatgataagttgctacatggagagcaatatgtgagtttctactctgtcttcgggtgccttcccagagatgcccccacattttcctacagcagtggggatataggatggactgaccctccccaccacacacacacacacacacacacacacacacacacacacacacacacacacacaccccccccccccccccccccggggaaaagcccatataaagcagttcccatttccctccacaaactgcgggctcccagtgaaaactaccttatagactttcttgcaaatcccattcttttctggccttctacgggatgacaggggcctagagaaggcagtactgggtggagttacctgggtgcgcatttgttgggatgtggcattttatggctattctaaggtctgttatcagttgtctgtcttggggagaatgtgcagtcgccatggtccaataatcctctatccaaggaccacacaggtcaccacaggtgctcaatcagtgtgatccacatggtgtgatgtgtgctctggcagggcacagatggacacactcagctctgtcaatgtgtaaacagggagtgctgcaatgacatggtttattcacagtcaccatggaatctgatgtggcattttaaaaaatgcgtagatctattgcaactgttatgaaaacatcactgattggccacgcacggtggcttacacctgtaatcccagcactttgggaggttgaggcaggcagatcacctgaggtcgggagtttgagaccagcctgaccaacatggtgaaacttgtctctactaaaagtacaaaattagcctggcatggtggcacatgcctgtaatcccagcttctccagaggctgaggcaggagaatcacttgaagccagttggcagaggttggggtaagcggaaatcacgccattgcactccagcctgggcaacaagagtgaaactccatctcgaaaaaaaaaaagaaaagaaaaagaaaaagaaaacatcactgattggtgaaagctattgaattagacagaaatgtaactctgcaaatatatatttaaatatttaatagtgaacagaatatctgaatggtgtgtatatacatatatatgttgtatgtgatttcagatgcaattttagatattctatgaaattgtgtaggcagaaggatacacctcaaactggtgaaaattatgtgtagatataaatgactactttttattttagtgtttaaatattttattacgtttgttgaggtgtgtattaactttctaatgaattaccacagtatagccagcagtttactacagcactcatttattttctcacagttcacagatgaaaaatgtgtcaggtttttctgggtactctgtctagtctcaccaggccaaaatcaaggtcaaagccatgggatcgactcttgagactgtgggggcagaattctcttctaagctcattcagattgttgtcagaattcatttctttctcctggtccccatattttcaaaatacagcatgtgaaattactctcgtgctcctgagtcctgacttcctccactattgcatctctctgacatatatttctgcttcaaggacacataggacccacccagataatccaagataactttcttttgttttgttttgttttttgttttttgtttttgagactgagtctggctctgtcaaccaggctgcagtgcagtggtgccttctctgctcactgcaacctctgcctcccaggttaaagtgattctcctgcctcagccccccgagtagctgggattacaggcgtgcaccaccgtgctggctaatttttatatttttagtagagatggggtttcaccatgttggccaggctggtcttgaactcctgacctcaagtgatccacccacctcggcctttcaaaatgctggcattacacacagttttttctttcaaagtcaaatgaggccaggcatggtagcgggtgcctttagtcccacctactcaggaggctgaggtaggaggatcgcttgaacgcaagaggcagaggatgcagtgagccgagatcgcaccaatgtactcccacctggccgacagagcgaaactcagtctcaaaaaataaaataaaattcaaatgactagtagccttcattaattaataaattaccagacaaattcctttttgcaggtaacataaacaagattagcaccaggagttggagacctgcctacaacattataggaccagtaaacctttttgcactgagaaaataatttgtcaatctagctagaaaattattaccgtctgggatatttcggttaagagaaatttgtatactatatattgataaactgtatttgtaatactctattttacatagttatataactatacatcaatataattaactatacatcaatataattatatagtaatatatatttaaatattggtaaactctacgtttctatgaaatttctatattatttggtattcagttgtgctcacgtgtccattgatttcttttcttttttttttttctgagaccaagtctcgctctgtagcccaggctggggagcagtgttgtgatctcagctcactgcaacctctgcctcgcaggtttgagcaattctcctctctcagccttccaggtagctgggattacaggcgcgcaccaccacgtccagctaatttttgtctttttggtagagacgaggtttcaccatgttggccaggccggtccctaactcttgacctcaggtgatctgcctacctaggcctcccaaagtgctaggattacagacgtgagccactatgcccgaccaggtttctttcatttttaaaagacttttaagttcaggggtacatgtgcaggtctgttacataggtaaacgtgtgtcatgggagtttgttgtacagatcacttcatcaccaggatataaattctagtgcccactaatcatatttcctgatcctctcccttctcccaccctatgccctccaataggccccagtgtgtgttgttcccctctatgtatctgtcttctcatcatttacctccctcttataagtgagaacatgtggcatttgggtttgtgttcctgtgttactttgctaaggaaaatggcctccagctccatccatgtccctgcaaaggacatgatctcgttcttttttatggctgcatagtattccatggtgtataggtaccacattttctttatccagtccatgggtgatgggcattttggttgacttcatgtttgctattgtgaatagtgctgcaacgaacatacacgtgcatgcgtctttacaatagaacaatttatattcctttaggcatatatcctgtaatgagattgctgggtcgaaggatatatctctctttaggtctattttgtggaaagcagagtgggaattcaaaaatttctaatgtaaactaacggcttcatgttcttccttttacttcctttcatgtctttcaaaatccttcttaggtactttgcctgattccatttatctgcatataacttaaaagatcaaaggtctaaatattataaggaaatctactttgggtggaaagacttctcagggaggcagagaatccactgagacatacgtagtgtgcgttcagtccctgatgtaccagagctcagtatttcctgcttccttcttgtgagaccctctctgcctccagggatcaaggagaagaaagaatctccccagacactccaaaatccctttggagatgctacccgcgaattagtacatgttttcttggtaattataacagggaaataaaagttttaaaaatataatagcgtcctggctgggcacggtggctcacgcctgtaatcccagcactttgggaggccaaggcgggaggatcacgggtcaggagatcgagaccatcctggctaacatggtgaaaccccttctctactgaaaatagaaaaaattagccgggcgtggtggcgggtgcctgtagtcccagctattcgggccactgcattccagcctgggtgacagagtgagactccatctctaaataaataaataaaaatatagtagcatcctaggactgcactgtcatagctgtgacaggtaaaatgatcattgcggttgtgacagcaggtgagtacacagaaccacaatcccatatctagcagcctggctgctgccctctcatataatactgactggcatgaccagcacactgagctcaccatccagacagaaggatgggtgaggtgactgttttatacttcactttgacaggtagagtatggaatagaaggaggtatataagaagtccagatatggccgggcatcggggctcatgcccgtaatcctaacactttgggaggccaatggtggggggggcggtggatcacctgaggtcaggagttggagaccagcctgcccgacatggcaaaacccatctgtactaaaaatacaaaaattagccgggcttagtggtgggcccctgtaatcccagctactctggaggctgagacaggagaatcgctagaacctggggggcggaggttgctgtgagccgagatcactctacttcactccagcctgggcataagagcgaaactccgttgtgggaggaaaaaaaaaaaaaaaaaaaaagtccagataagtgatcacatcaagaaaagcgaatcttaggggtttgaaactagtttaatgtcaaagccacacaggaaggaggaataattcctgaggcatgagttgagccaggaaagagagttggggactgtagaccctataccagtccctgatagctcctaatgtagtttagtttaatccttcaataataatgatttttttggtgtttaatccacatgataatgaaacctgggttttaaggtgcttgaagactggaattctaaaatctatctgtggttcagcctactttacacaaatcatagaaagagttttaaggataattagaagtatgcccttatgacccacatactggaaatgattgggataaatctacaagaattacctaattctgtgcagaatccacaccctcaagtggcagttctggggctagaaatgttatctcaaagtctcctctttgaagggctaaatggagagtcattgtttctctattgaaaacataaggagtctgttgattatggtgagactcttttcagtcttgaagttaggaaggcaacatttagggaacaggaaagttttaataatcagttttagatagcagttgtcagtcttgaattgtaatgctgttgtctggcttaaaagaaagtctaatatccggctctgatcacaacaattcggtaagttggtgaggtgatgcatacgttaattagcttgattgaatctttctacaatgtatacagagatcaaaacatcccattatatcccctaaatagacacaattattggccaattaaaaataaataaatgtggccggggcagtggctcacacctgtaatcccagcactttaggaggccgaggcgggtggatcacctgaggtcaggagttcgagaccagcctggccaacatggcgaaaccccatctccactaaaactacaaacgattacctgggcatggtggcaggcgcctgtaatcccagctagttgagaggatgaagcagggagaatttcttgaacccaggaaggcgaaggttgtggtgagccgagaccatgccactgcactccagcctgggcaacacagccagattccgtctcaaaaataataataaaataaataaataaatgtggccgggtgcagtggctcatgcctgtaatcccagcactttgggagaccgaggcgggcagatcacaaggtcaggagattgagaccaccctggccaacttggtgaatccccatctctactaaaaatacaaaaattagcttggcgtggtggcgcatgcctgtaatcccagctactcaggaggctgaggcaggagaaatgcttaaaccagggagtcagaagttgcggtgagccaagatcgcaccactgcactccagcctggtgacagagcaagtatccatctcaaaaaataaaatataaataaataaatgtaatcaaatccaaatctaccatttcagtttatcaaatgcacaagattccatgccttacagatttaattttttatatatgttctatattaacaccttttacaaaactcacctcaacacttattgttttactcaatttatgtattcattaattgatgagtatatgaactgaaaattgtggggaaaagaaggagagatcagactcttactgtgtctatgtagaaagaagtagacataagagactccattttgttctgtactaagaaaaattcctctgccttgaaatgctgttaatctgtaaccctagccccaaccctgtcattgcagagacgtatgctgtgttgactcaaggtttaatggatttagggctgtgcaggctgtgctttgttaaaaaagtgcttgcaggcagtatgcttggtaaaagtcatcgccattctccagtctcgagtacccagggacacaataccctgtggaaggccacagggacctctgcctaggaaagccaggtattgtccaaggtttctccccatgtgatagcctgagatatggcctcatgggaagggaaagacccctaccccgacacccataaagggtctgtgctgaggaggattagtgaaagaggaaggcctctttgcagttgagataagaggaaggcatctgtctccagctcatccctgggaatggaatgtctcagtgtaaaacctggttgtatgttctatttactgagataggagaaaaccgcctcagggctggaggtgagacatgctggcggcaatactgctctttactgcacagagatgtttgtgtacgtgcgcatcaaagcacagcacctttccttaaacttacttatgacagagacaccttcgctcacatgttttcctgctgaccctctccccactattaccctattgtcccgccacatccccctctcggagatggtagagatagtgatcaacaaatactgagggaactcagcaaccagtgctggcgcaggacctccttatgctgagtgccggtcccctgggcccactgttctttttctatactttgtctctgtctcttatttcttttctcagcctctcgtcccaactgacaagaaacatccacaggtgtagaggggctggcccccttcagaaaatagacataatttaattttatttatttattttttttttttgagacggagtttcactcttgttacccgggctggagtgcagtggcacgatcccggttcactgctacctctgccttctggtttcaagcaattctcctgcctcagcctccctagtagctgggcttacaggtgcctgccactattcctggctaatttttgtgttttagtagagatggggtttctccatgttggtcaggctggtctcaaactcccaacctcaggtgatccgcccacctttgcctcccaaagtgctgggattacaggcatgagccaccacgcccagccatgataatttaatttctaccctactttattttatgatgccctagtgtttcacgtcatgtagttaagacatgatatcagaatgtccattaattcctgtggtaggtgccatcgtactttccttcctggcataagaagaaatgagtctctgtgtggctgtcctgatatggggtcgactttttaaacctactttagtcatgaggcagattcctgtaattttatactccaatcagtgtatctacattttatcaaggtctttaaagatttattcataattggtatcagcctctggggtaatgttttacatgtcaatggaaaccggtgaaaaataaaattatgaaattaaatgtcacctgtgtaaaatataaagaccaggtataaaatagaaattaaatatgtatgttcattattggaagaaccccgctaactggctttgacagtagagcatggtggttaatgcactctgaaatcagcccagacaagatcagtccccattctaccccaaacatggtgtgaatttacacaaatcatgtcacctctctgtgcttgagtcctctttgtctttataatggtggtacctggctcatcgattatgaagaatatggaggtgaatacatgtctgttcttcacagcaaagagcaattcattgcaaatacacttaaaataggacacatccaaatatggcgaattcttcatactagaaagtaactttattatttctgttgcatttcagctgggtttatttttatttttatttttatatatttacttatttatttattttgagacggtgtcactttatcatccaggctggcgtgcagtggcgcgatcttgcctcactgcagcctcaacctcctgagttcaagggatcctcctacctcagcccccaccaagtaccagctgcctttttaatgtcactcatgcatcacgttccctgcaggatcctgtgtctctgaagataagtagcagcctgtgagaactgacagaatggctgctgggatgtggccatgggaatgatcttcttatcacagactgtacttggaatcctgggaatttctatcttatttaccattatctgtccttttacatcactgggtgcaggttaaggtccacagatttgatgatcagacacctaattgtagccaacacgttattcctcctccctagaggagtcccacagacaatggcagcttttgggtttaggcatttccggagtgattctggatgtaaatttcttttttgtgtccacagagttgtcaggggagtgtccattggcagcacctgcctcctgagtgtctcccaggccatcaccatcagccccaggagctcaggtgggcagagcttaaagggaacgcccccaagcacgctggctcctgtgtgttcctcagctggctcctccctggtcaatatcattgttctcatgcacgtgaccggcaagtggagcaacaaaaataccacgaagacaaaagatctgggatactgttctgctgctgatcacgagggcaccagagagtcgctgacgcggcactgctgtccttccctgatgtgatctgcctggggctcatgctctggggcagcagctccatcgtttgcatcctgcacaggcacaagcggcgggtccagcacattcataggaccagcgtgtcccccacatcctcccctgagtccggagctaccaaaaccatcctcctggtgagcacgtttgtgtccttttacactctctcttcacctttcaagtttgtttggctcttttgaataatcccagtcagctggtggtgaacatctctgcaatgatcagtgcaggtttcccaactgtcagccgctttcttctcatgagtggagactcctgtgtatccaagctttgctttgcttagataagtaacacaaaaccccctaatcttatcagaaatatgtgaattggacatgtttgtacaatgtttatgtttcttcattgatctctagagacccataaacacggttatgaaacgaggcttgttagtgctgtgcttgccagcaggggccactgttttattctgtacctcctgatcccccctccaaccacaccgccctggagcagctctgtggaaaaagtggaatcagcttagaggttttggagaggaagatactgaaacgtaaacgatataagaaagtcacggtgcacaaatatacatacctcatttctgtgtcccttggagcagatgggggaatgtgcgcagatgcgaagctcttgctgtaatttatgtgacaaataataaaatatatgttttgtcggatccagaaatctcatgccttcagccaacatccataaactgacagtctaacttgttggcttgtaagtaaggtaaaaatctaaaactggccaggcgcggtggctcacgcctgtaatcccagcactttggagggccgaagcagacggattaactgaggtcgagaatttgagaccagcctgacaaacatggagaaacctcatctctactaaaaaaaaaaaaaaaagaaaagaaaaaagaaaaaacattagccaggcatggtggcacttgcctgtaatccgagctacttgggaggctgaggcagcagaatcacttgaatccaggaggcggtggttgcggtgaaccgagatcgcgccacagcactccattctgtgtgacaagagtgatactctgtctcaaaaaaaaatctaaaacattttgcaatttctgatagttttggtgatgctgagacagatatgactttgtgtaagaggaaggtagaaagattcttcactggcgtggttagtaggcagaaaatggctctctggaacaagcagcgaattctcacccaaactgaggtgaaatgacagtaagacttctccattcttttttttttttttttttgagacggagtttcattcttgttgcctaggctggagtgcaatggtacgatctcggctcactgcaacctctgcctcccaggttcaagtgattctcctgcctcagcctcccaaatagctgggattacaggcatgcgccaccaagcctggctaattttgtattttttagtagagacggggtttcaccatgttgttcaggctggtctcaaactcttgacctcaggtgatccgcccacctcagcctcccaaagtgctgggataacaggcttgagccacagtgcccgaccaagattcctccattctataacccttgaatgggactgttgtgtgagagggaggattgaaatgaactgtccgaatgtgatttatctgttgctcattctcttcctggcaggagcaggaaaggacaaggagtccccgaagctgacactgagttcatggggttgagctgacagcggccaacaggctgtggtaaacgctaatgaaacgagccttgttagtgctgtgcttgccagcaggggtcactgtttccttctgtacctcctgatccctccctccacccacaccgcactgcagcagctctggggaaaaagtggaatcagcttagaagtttttgggaggaagacactgaaagtcctacttttttttttcagatgggatctcactctgtcggccaggctggaatgcaatggtgccaacttggctcagtgcaacctccccaccccgggctccaacaatcctcccatctcagcctctgaagtagctgggactacaggtgtgcctcatcaccatgggctatttttatttttgtattttgtagaggcaaggtcttgccatgtttctcaggctggtctcaaactcctgggctcaagtgatctgcccacttgggcctcccaaagtgctgggattacagacgtgagccaccgtacctggcctaaaactcttttactcctgttgcatgcaaggatttaagtcaccaacgtacgtggattccagcaagaagggtcagtagacgcaggggtgggtaaaggtgctaaggatggtggggtgaagtgtggctgcaaacaggcagaaagagacaagcttctgaccctgaatagtcaccaaatgctggatggtgcaatgctaagaatgcagcacaggccgggcgtggtggctcacacctgtaatcccagcgctttggaaagccaaggtgggtggatcatgaggtcaagagatcgaaaccatcctggccaacatggtgaaaccccgtctctactaaaaatacaaaaattagctgggcgtggtggcatctctttgtctgtgtctttatttattacaatctctcatctccgcatacaggcgttatctcctgtccggggaagaggtgggcctctctccgtcgtgggaggagctctgaacttctccttcatccagggatgggccccagggacccaccagtggggctgggagaagcccccctcagcaggaagacagaggtgcctgggtggccgaggcctggaaggtctgcaccatggtgcacagaggccccggagctgggtgaggccagaaagctgctctggggtcagcggggaatgtgcctgctgaatctgtacctgagctacgtcttcacaaatggcctcagacctagagtgcagggagatcccctggcttttctgaagtggtggcaggtggtctcctgggtagcaggatctgggctgcttacttcccttacccagtgagggcccgcggggagctcttaagttgggcatcatggggctgcgtgatgtggctgctgtgcccacatcagagggtttttgtttcttttccaaagtcaagctgcactaatctagaccagggatccccacccctgggctgcagaccggtccccatgggtggcctgttaggaactggaccgcacagcaggaggtgagcagtgggtgagtgcgcgtgaccacctgagctctgccttctgtgagatcagcagcgccactgcatctcagaggaatgccaaccctactgtgaactgtgcatgcgagggatctgggttgcatgctctttatgagatcaaactaatgcctgatgatctcaggtggaacagtttaatcctgaaaccatccccccatctgtggaaaaactgccttccactaaaccagtccctggtgccaaaaacactgggaaccgctaatctagacagttctctgctaaggaagcacgtggttgagaagcatcagaatcgttcccacggaccatgctccggagtctcagcaggctcctgcaggtgagccccactggcctctcctcttccttccggacctcctcagctttggtaatggaaagctgcatcctcttctgtccccagttcctctctgggtgtcaggatctctaaaaccctctcagccgctgagaagtctgtctgtctgtctcacagtgtgtttatccgtgcatcatgaaggaccctcatacggctgacgtgccttggctgatgcgaataacactgcagcaagcgtggcagtgcagatagctcttggaaatacccatttccttcagacgcatactcagaggtaggattgctggattgtttggtcattttgatttttaaaattaaaaagaattttaattctcatattgttttgagtaaaattaaattataacttgtaaggcaactccatgttttttagaatttttaagaaaaataattgctctaccaattgactgtcccaacaacaacgtacaggggtattttttttcctccgcatcctcaccacttgttaccttttgtctttttaataatagcaatcctaagacatgtgaagtgatacctcactgtgattttgattggcattttccagatgattagtctattcaggccctttacttttttttgttgttgttgttgtttttgagatggattctcactctgttgcccaggctggagtgcgatggcacgatctcggctcactgcaacctccgccttccggggaggcgtgattagccaccacgcccggctaacttttgtattttagtagagatgaggtttcaccatcttggccaggctggtctcgaccccctgatctcaggtgatccactttgcccagcctcccaaattgttgggattacaggtgtgagccaccacgcccagcccctttgctcttttttaatagggttattactattaccatatttgcttttgagttgtgagtgttccttatatattttggatataaactccttatcacaggtatggtatatatggtttgaaatattttctcccattatcatgccccaatatcactaagttacatttcactgctccctcttgaacacctgaaaaaatttcctatttccatgtgtctgtatccaggttattgtcacttttacctgaagacacatttatatatgctgatattccccaataactaatatatttttactcttttttttttttttgagatggagtcctgctctgtcacccaggctggagtgcagtggcatgatctcagctcactgcaacctctgcctcccaggttcaagtgattctccttcctcagcctcccaggttgctgggattacaggcacatgccaccaccactagctaatttttttgtatttttattagagatgcggtttcaccacatgggtcaggctggtcttgaactccggacgtcatatgatccacccgcccttggtctcccaaggtgctgggattataggcatgagccgctgcacccggccctaactaatatattttaaataactttttgctcttggcacatggactaaaaccacatcaccaggccttcaatgacgtccaatgtctgccatcttatttccactccagctccgccccaggcatagttgcctttctttttattgaagccttctccttgccaagttaattaaagagaatgttttcttcatcaaattagaaattacatcctcagagctttccagtatttgtagttcttacaggccacatttattacaagtttatagactccaaacttctccactgaacagttaataaaaaggacacaggcttattgtaaaataattcatttagtgcctgccattctgattacactagaaatttagttctcctgctcagcgttctgttatgtgactgttcaatgcattacttaaaactgcaagattgaatagagagatcagcttctgacactgatgaatgcaaaccacaagaaaccaagtctcctctgcaaaatgatgaaaacactcgcaaagtcactaaaatcaatcatttcagacttctgaaatttaccaaagccacagaacaaagtgaaaagtatctatcccacagaaagtaccaaacttcagtaagacagcagcatttgtgtcattttaatgtggaggcattaccattaccctccatccttcgttcagtgtagagcactgacctcttttgaagctccttttaaacacctcctatcaggccagtcgcggtggctcaagcctgtaatcccagcactttggacgacagagcgagactccatctgaaaaaaagaaagaaaaaaaaaagagaaagtgacttttcaagactgtgatttatggtctcccctgggaaccaacagtatctgtgctgagagcagatatttgggtggaaggggctctggtgtgcagggcatgccttctgtagctcagtgcttctgacaatgggtccgaggggagaaacattggcattaacagggaacttgttaaagatgccaatttataaatgctacctcaaacctgcagaatcaaacattattacagtgggttgtggagtgccagatgacttatattcaccttaaagcttgagagtcagtgcttagctaagaggctctcagcccaggcttccagttggatcaaatggtcatattcagttactaccatcacctgtgccctccccatagcgtctgtctattggtgtcgggggaaacatccatgctgtttcaattaactaccctgcccccaggtgattctagggtgaggagaagtccagcatgagggcttccatatgcatttgtgaaggttgatggcagactgttccaaatgagaataatggtttccgtgatatgataaaagcaatgctattgaatatgatgatgactgatgagaagttttgcatagcattcgctgtaaaaaagccacttataggctgggcacggtggctcacgcctgtaattccagcattttcggaggctgaggtgagcagatcaccggaggtcaagagttcaagaccagcctggctaacatggtgaaaccctgtctcaactaaaaatgcaaacattagccagatgtggtggtggatgcctgtaatcccagctacttgggaggctgaggcaggagaactgcttgaatctgagaggtgtaggttgcagtgagctgacatcatgcctctgcactccagcctgggtgagagagcaagactacgtccaaaaaaaaaaaaaaagagagagagaattttcctgtaaataattaaaaagactaagcagccccagagataagacctcctgggatcattgtccctttatattgagtgataaagtaaccttccttgaagtatatcaatccataaccaatcaccttgctgcaccctatgtactggtcttgaatggaaaatgtggtgattcttctaaagcttctctgtctttccgtgtgtgtgaaacctaagggaacgctgatcccattcatttggagttgatgtttccaggtggctatcctcatgctttgtgttcaaataaactctgtgcttaatcatatattctaaattttattatttactgctgatatcagtttctgtcagactgtaggagcctcaccagagagggcacctgtcgctatgttgtaaaactcacacttgtcagaaagacatgggttagtgttactccccgtccctcagaatgaagctaattagctgacacagatggtcacctccattaccaagtagagtcaggatgaactatgtgtgaccaagagtgttgtcaagtcctcttccctgaggactgattagcgtttatcttgaaaacatgtccttaatgggttgtatagaacagtaaagtttctttctcttttttcaacctcttagctgtttgcctgtatttcgcatcacaatctggtctaaggcttatttattaatgaaatggttttaatttctttctctatgatcatcgtggagatgatttctcatttggagaaagactttttgtttgttttcaattatattttctcaacaattagacagtgaagtaaaaagtattttgggggggccaggcacagtggctcacgcctgtaatcccagtactttgggaggccgaggcaggtggatcacttgaagtcaggaggttgagaccagctggccaacatggggaacccacctacaaaaatacaaaaattagccgggcatggtggcacgcgcctgtaatggcaggtactccggaggctgaggcaggggaatcgcttgaacccaggaggcagaggctgcagtgagcccagttcctgccactgcactccagcctgggcgacagagaaatgctctgtctcaaaataaaagaaaagaaataagtaaataaataaaagaaagtaatagatctcttctacaaatgtgctgggacaactaactggatatccacatggaaaagaataatgtatccctatctcacacaatcaaaattttattttaacgttaaaaaatggagaaaaaaagagagagagacgagggagggagtcctgagggaggggtgttactttgtcgcccaggctggcctggacccccaggctcagcgatcctctcgccgctgcttcctgagtagctgggaactcaggctcccgcccccgcgcctgaatccttgctgtgtttatccagcaggtcgcccctggctggcctgagcattccgtcccgcatcccagggggaggccctagggaagtctctgcagctgagcacggggtggactctccctcctgagtgagtggagaatagaaagggagaggatttctgttctgttctgtgggccgtcagcatgaaatcgtacgttccgcccaggcagggccttgcattttacattctagtttgtatcccgttccagacaattccagggcttttgagtccatgcgtcagccttcctgggcggtctcaccttcaccacccgaaaacaggtgctaggagagaagctgagaggagcaccggtcacgccccggccccgccctctgccggctctaaagcgcaaggtctctccgcctcgcgccccgcccctgcctcgtccaggccccgcccacctccttgcgggtcccgcccaggcctggcttctgctctgcgcgcgcagattcgtgcagaccaggaagcggatagcgtggagtgacggtgccaccgcggcgcgtgagtttcgccctgtcttgtattaagtctgctcttccaggttcctggcgcttctgtacctgggacttgggatccccacaaacctggaaattctcagccgtcttccttcactcagagcaaattgagacgacctcgtgagaggccgtgggtcggttccttttgggtttaaggtccccctgaggctggtcccgtcccgggtgtttctgctacagggcaatgtatacactttctaacctgtagttttcctgctgtaaacctttttctgactcctcccgccccgcgctttttaaagtcctcacctgagaggtggattctcgcctttgtcggcccctggagcccagcgccgctgccccagtcccggaaaggccgcgtcctctgcctggtcctaggatcctgcagaccccacccttgccttaaggtgctgtcgccccttcacctccctccttgtgccgggccctgctgctccacgggtttcgcctccacaatcaccgcttcccctgagcccgcgttggggaggtgcccggggcctgtcctgtgacgcggggtgttactgcctgcccagctccagcccctggaaaatgcgctcccccgggatgcaggcgtcttactccaaaccctcctgtgactgtgtgggccaaagggatcaggagacggacagagagcagtggaaaacctgagacagaaaagaagaatgagaaagacctataacagatggcaaagtagaggatgggtgagggatttgccaagagacagcaaaagtgaaaagaaaacgataagaaagcaggaggagaaaagcaagtgcagaaatgtagagaaaagctggatgtacagagagatgaaggacagcaaggtagggagagggacagcaaagagggaggctcatcagggtgagggagaggaggagggatttggagccagggcagacagagcagagtggtgctggtggcaaggagaacagagggagaagcacagcagggaggacacctggggatctggggtgctagagagtggggacaggggggtataacagggaagagagaatttaacggggagagcaaaggaggcgcagagatggtgttgcgggaaactgaggactagacagactgatatgggggagacaaaaggatgtttatttaagatacgcaccggctcagtggatttacatctaaaaagctgagcatttcaacaaagacggagtggggttttttgctttcagaagcagaataaaagcagttaatcatataatgataggtcatgtaatctatagcatagcataacttgtgtccttccatagctggtggcctcgtagctgagttgaaagaaaaacaagaacagctaaatacacacatttgtcctttttttttttttcttcactcttgttctgggaaggtggggggctgtctggagcccatttctttggcttcgacttcgccaagtcgagcttgctaggcagaggaaaacttgttcttcttttctttttaacccttgccttgcctgttacttttcttggagtgaatgaatgcatgtttgttttttaactttctgcctcagttttctcccttagatgccttttatgaacaagattttactagaagacatcactattactggattcttcatgaaagagcactggctgatatttatatcgggctattagctgagtggtagtctgcctggtcgcaattgcttctatagttgattgaatgctcttaacacggagaggtaagaggtaagggagtatcaaaccaattcttagtatggctagaactactcctattaaggttttgaatctactgaaggaggaaaaccagcctctaaagacggactcaagagtctattttgtctaagtccggactggaacgtgggctaattttttcattcttacagttatttctttaatagccttcctattgtcattgatttctaggcagcaattagttagattacactttctacatactcctccttcctaggctaggaggtagtctaaagctaatctattttggtagatggcatttctcgtttttgtggcttgctgggccagtaagtctaatgcatttgctgtttcattagtgatgatttcaagtactgcttgcgagtttatgatgcggttaagtgtgtaaattggggtgcaataccttcgtgacttatcttgtgcccaggtagctggcctagagtactgaattagtctttcaggaggcaaatctgtgtctttctaatcttctatttctatgtatttccttatgtctatatatcttttgtttttttctttaattttattgtagacaggataccttcaagtttctccctgttgcagtgggagtaagaagaaagatggtctaattgtttcaagtacactagcccttgtccattttcctggcaactgtcggtaggcctgtggcccacagatccaatagagaccagagggtgcttgccaggtatttggagcttcaagctgatactaggtgtggtttagagaagagaaacaggagaatgggtttggatgaggtgatctggagtcatctttgccttgccacaaagttttctttagtgttttattataatattgctgtcttaaacaagttaattcttccagtgagtctgtaaaagcttttccttagtgagcaacccagtatctcctgataatagaagtttttaagagctaggtgcttgaacttgtgggcatcggttcgggggaagagtcagttagagttaaattatcttgtggcattaactcttttgcttcttaaggccattggtctactatgttcgtccttctacaaacaacatgaggaaatgcttaagctgctagcaatcaatgttttcagctaaccaagcaaacaggtttttagctaaaggatgatgctctggtaacttctggtctacatgcttatggaatgatttaaagactcggaattgttgctggtccgggttcctttttgataacatataggtaggttgctgggtaggtgtgtgtggagacacgtatggggtaacctgcagtccgcatgggtaagtctggctttagaatggtgaaatttacaggattacaggttggacaagcatcaaaatacagagaaataggccatcggtaaaagggggggaccttggtttggtttaagaggtgactttcttttgaccttgcacgaatttaaactattcaccaggtgaaatcttggggttataacatacataaggttggttatttcctggtcacaaattgagtaactgagtaggtcgtctggctataaatacaagtccttttttttttttttttttttttttttttttttgagatggagttttgctcttgttgcccagtctggagtgcaatggcatgaccacggctcaccacaacctccacctcctgggttcaagcgattctcctgcctcagcctcctgaaaggctgtgattacaggcatgcgccaccatgcctgtttaattttgtatttttattcaatacggggttctccatgttggtgaggctggtctcgaactcccgacctcaggtgatccacccatcgtggcctccaaaagggctggaattacaggcatgagcaactgtgcctggcctttataagtacaagttcttaagtgagtccttgtacactcataataagtatggtgcagtagagtcttagttatcctgttccctgaccaggtagtatgtgtacagtggggacacatttctatagttgcttcttctaccatggttaaggggggtgacaacagcaaaacagtgtacagcatgttcatatccagcaaggacagaagagggccttgcctggcagaggaggttgagcacaacgacagaacaataataaaacagttagtattacaaggaaaactactagtcttaagatttctaaccacatttacttgcttgacgagtcctcaagcttcggccgtgcgtagactagtcagcttctggtgtgtgactagagctgggcttgtcgtcccctccagcttcagctgtgcatagactggtcagcctccagagtgaccagagcagggctgtcgtcctcagcagcagcttggtctcatctcaggatcggctgagttggatgatctgggtcttgctggctgttccacttgtcctgaactgctggtttcagctgactgtggtggacctatggcatgattcctgcaaatttaacagcagtgggagtggacaagattacagtacagggcccatcctatatgagtcctagagaagttggattctactttttaacctaaacagagtctccatgttgaaaggggtgtacttgatctgtcagacttataggcattctttcttgtattcagttatggacttcttgcatggctgttcttaaagcctgcatttgcttgcttaaagttaattcctctagttcttggagatcacctttaatttgacttatgattagggcaggccgactgaacaaactctaataaggtgaatacctagtttgtttggtgggggtgcacctgacttggaggaggaccatacgaaagagctgatcttatctcagatgagtttcttggcagtatttcttcagtagctgcttgagtgtccagttcatgcgctttactttccttgaactttgtgactgatagtctgtgtgtagcttctattttatttttagcagacttgtgaaatcttacactatttcagctacgaatgctggcccattgtctgactttaaaggtagagccagtccaaacctggggataatgtcttttatcagtactttagtcacttcttgcacttttcccctggtggagaaagccttaacttatcttgaaaaggtgcaaataagcaatagcatatacccatagcctctggcacggggcagttcgctaaagtttataagcaagttttcacaaggcacggctcctacttcttgaattcttggggctgagtgggcccctgtcgtgggttattctcagcacaggttaatcattgttcacaaacatcttgagtgacagcagagagccacggcacatagaaatggcactttcgtgacccagcgcagtggctcatgcctgtaatcccagtactttgggaggctgaggcaggcagattatgaggtccagatttgaagaccagtctgaccaacatggtgacaacccatctctactaaaaatacaaaaaaaatagccagtcgtgttggcaggcgcctgtaatcccacctactagggaggctgaagcaaaagaaacacttgaacctgggaagcagaggttgcagtgagccaagatcgcaccactgcactccaacctgggcgacagagcaagactccatctcaaaaaaaaaaaaagaaaaaatggcactacataacgttgctaatgctgtttttcttatatgattttcttgatggatttgcttcacaaacttaggagctaacatctttggaatggctagtctcctatagaagaacttcttttactttcttttcatacattttatatcttcttggcacaccaggatctttgatttggagtataacttgggtcgtcttggagaggaggttctgggaggagaggcatagctaaggcttcctctttaaaatgcagcgtgatcattgctgcctgctttgcctccctgtctgcttttctgtttcctttggcttctggcatccttgccttttggtggcctctgcaatgcattatagctactttttctggaagctatacagcctctaagtgctgtagaatctcttctttgtactttatttcttgcctctagctgataaaagtcctttctctttatatatagttccatgtacatgcaaggtagtaaaagcatacttagaattagtgtaaatactgactttcttctcttttgctagcaacagtgctcttgtcagggctattaattctgccttttgagctgatgttccggtaggcagaggctgagcctctactactgagtctgatgttaccactgtatacctggcatgtccaaactcttccagcacagaactacttccacctgtgaagtacttgacatctgggtctctgaggggtctgtctgtaagatctttctcattgggaaatacctcgtctactgttttgacacagttatggagaagagctgcctgttcgactgggagcagaatagccaggttagggtgtttagtgttctaaagttgtgtaagggttttcacatagaagcccttggtaccaagtcatcctcaggtttgataactaatggtgccttctttgatccatcaaagttatgactgaatgtggcaccgggacagttagttgctgtcctagagttaatttgctagcttcttgtgttaacaagatggtggcagctaatgccttaaggcaaagaggccatcttaacaccatggagtctagttgttgggataaatatgccactgggtgacgccatgatcctataagttgagtcagagcccctatagtcattgttttttgttcatgaacatatagaaagacttagttatgtctcatagtcttaaggctggggcctgggttaaagcttccttgatctgtttgaaggctatttcttggttagttttttaaaagaggggctccttttcccctccttttgtggcgtcatataacagcttagccatcagtgaaaaacttggaatccagatgtggcagaatgttgctgcgtctaaaaattcctatttgtcatcgggtagtcggagttagaagtgcacaaatggcttgcttcctctcatagccaaaccagtgttcctcgtggctcaatatgacacctagatatgtaacctcttcatggaaaatttgggctttcttttttgatattttgtaacttgctttctataggagatggaggagatcctgggttccccgataacactcctctcaggttggggcaggcaaagaaagctcgtctatgtactgcaacaaggcacagttgttacttggcagggtataggccatgaggtctgaggccaatgtttctctaaagattgtgggagagaacggggcatggtggtttgcgcctctcatcccaacactttgggcggccacatggctggatcatgaggtcaggagtccaagaccagactggccaagatggtgaaaccctgtctttaccaaaaatacaaaaattaggcagccatggtggcaggcgcctgtaatcccagctacccaggaggcaaaggcaggagaattgcttgaaccgagggggcagaggttgcagtgagctgagatcgtgccactacactctagccttggtgacagaacaagactctgactcaaaaaaaaaaaaaaaagattgtggtagttgtttttgttgttgttgttgtttttgagatggagtcttgctctgtcacccaggcgggagtgcactggcgtggtctcggctcactgtaagctctgcctccctggttcacgccattctcctgcctcagcctcccgaataggtgggaccacaggcccccagattgtggtagtttttaaacctttgtgggagtctagtccaggagagctgtgacgcttcttttctcttatgaaatgcaaagataggctgactaactggtgccagacagataacaaaagaaagaaagcatcctttaagtctaagactgtaagctagcacttgctggaataagagctatcaaagtatacgggttgggtaccactggatggatagttactgtggcctggtttatagcatgcaaatattgcactggcctgtattcatttgaacctggccctggcaatggcttctgaactggcaaaagcagagtgttctaaggcgactggcattggactaaaatcttatgtttatagagccgttctaaatgcttgcagatgccctgtacagacttttggggaactgggtactgatgaacccgaacaggagttgcttctggttttaattctgctactactggtgcatgatttacagctaaaccaggtgggttgtcctcagcctatactccaggaatttctttagctaactgaaataatgatttttgttcttcttgcatatgaggttgcactggtacctgaaaaagaggctgggtgctgtggctcactcctataatcccaccattttcagagactggggcaagggcattgcttgagtacaggagttcgagaccagcctgggcaacatagtgagacccccccgtcttggccaaaaataaataaataaataaaatgaaccaggcatgatggtgcacacctgtgctcccaattactctggaggccaaggcaggaagatcacttgagcccaggaagtccaggctgctgtcagctgagatcatgccactgcactccagcctggtcaacagagtgagaccctgtctcaaaagaataaaaggggtgggggactttgggttcagatgagtgggtgagttcactgggtatgattacttgtgacatgttgacttctgtgtatataatctaataacttaaaatttgtttaaattatacagatgagattgagaacttaaaaattcctatctataaggcatgtacattgtataaatcttggcatagaggtcagcttccacttggaatccctattcagccagagggcagtgacttattcagttgtgaattactctgttccctttttgcaggatggggtaggaagtggggcaatgaagtgggaaaaaaatctatttctgttattacataatacttttaattaaattaattaataattagtattttgagacagggctggctctatcgcccaggatggagtgcagcatgatctcttctaactgcagcctcgacctcctgggctcaaaccatcctcctacctcagcttcctgagtagctaaggtcacaggcatgagccaccaagtcaggcaagttttgtacatttttggtagaaacgcgtttcactacgtttcccaggctggtctcaacatcctgagctcgaaggatcttcctgccttggcctcccaaaatactgggattacaaggataagccaccacacctggtctacatagtacttttcaaaagggatatcaaaacgtggtggcccctgccattaaccacagcactttgggagacagaggcgagtgggtcacctaaggtgaggagttcaagagcagcctggccaacatggtgaaacctggtctctgctaaaaatacaaaagttagccaggcatggtggtgtgcacctgtagtcatagctactggggaggctgaggcatgagaatcacttaaacttgggaggtagtggttgcagtgagcaaaaatcctgccactgcactgcagcctgggtggcagagcaagtctccatctcacaaaaacaagcaaacaaaaaataaaaaacaaaagggacatcaaaagtgcttttgttttcatgtgtaatagatttactttattttatttctgtttcttcaattctttattttacttatttatttattttgcagtttgagacaaatgttagtttcgggtttttttgttttttgtttttttttttttggcagaatctcacgcagtcacccaggctggagtgtagtggcatgatgtcggttcactgcaacctctgcctcctggtttcaagtgattcttttgcctcaacctcctgagtatgtgggactacagtcccgcaccaccacacccagctaatttttgtacttttagcagagatggggtttcaccatgttggccaggctggccttgaactcctgacctcaggtgatccactcgccttggcctccccaaagtgctgggattacaggcatgaatgaccatgcccggctgagataaatcttagttttcaaaatttcttttttaattcataatcacagagaggagtctgcaatgccgagtggaggaaggaggaaccggagtgtgagcagtagctgggtgggcagcatggctgggatcaccaccatcgaggcagtgaagcgcaagatccaggttctgcagcaccaggcagatgatgcagaggagtgagctgagcacctccagtgagaagctgagggaaaaaggtgggcctgggaacaggcagaggctgaagtggcctccgtgaacggtaggatccagctggttgaagaggagctggactgtgctcaggagcgcctggccactgccctgcaaaagctggaagaagcgggaaaagctgctgatgagagtgagagagatacaaaggttattgaaatctgggccttaaaagatgaagaagatggaactccaggaaatccaactcaaagaagctaagcacattgcagatgaggcagatgggaagtatgaagaggtggctcgtaagttggtgatcattgaaggagacatgggatgcacagaggaacgagctgagctggcagagtcccgttgctgagagatggatgagcagatcagactgatggaccagaacctgaagtgtctgagtgcagctgaagaaaagtactctcaaaaagaagacaaatgtgaggaagagatgaagattcttactgataatctcaaggaggcagagacccatgctgagttggctgagagatcagtagccaagctggaaaagacaattgatgacttggaagataaactgaaatgcaccaaagaggaacacctctgtacacaaaggatgctggaccagactttgcttgacctgaatgagatgtagaatgccccagtcccaccctgctgctgctccttcctctgaccctgactctgcctgaggccagcctgcccgaagctgacctttacctgagggctgatctttaacgggaaggctgctttctccttttgccaccccctccttccctgcctctttttcaccaaactgtctctgcctcttcctggagattccagctgggctagaggctgagaacctttgcaaacaacatttaagggaatgtgagcccaatgcataatgtctttaaaaatcatgttgtgaaaaaaaaaatacataatcacttctgaaagatgcctttgtcacatcctataatcagctcacatcatttttttctgtacaagtatattttccagttatttacctgttgaccccagaatttgttagatttttaaaaaaacaatttctaaatagtttctgtttgaaactagttgcgtccagttcagatcaaggtctgcatgctttctagtctttattatttattggaaaacttcggtacctaatacaaaagtttgattgtttcagtgtgtacctggtaaagaatcagtgaccttttaccttaacatcaaaatgtagtttaaccagttaatgtatttttcagttttctttccttatgt[267 bp omitted]agtgatcaaacaaagcagcaggtggtgaggatgtggggtttgaaaggaagcagtgcatcaagcacatgatctataggtgtgtcaggttaacatttatatggaacatgttctgctacttgagatcatggggaacatattcttctagtttaagatacaatcattttatgagtctgggagtgctagaagcaaagaaccatcaagtctaggcacattccagaggccacgaggggttttatgccctgaaacctggattccatccaagccacaaggggtttgttggggaaagaaagagagatcagactgttactgtgcctatgtggaaagaagaagacataagaaactccattttgttctgtactaagaaaaattcttctgccttgagatgctgttaatctgtaaccctagccccaaccctgtgctcacagaaacgtactgtgttgattcaaggtttaatggatttagggctgtgcaggatgtgctttgtttaaaatgtgtttgcaggcagtatgcttggtaaaagtcatcaccattctccagtctcaaataccaagggacacaatgcactgcagaaggccacagggacctctgccccagaaagcctgggtattgtccaaggtttctgcctgctgagacagcctgagatatggcctcatgggaagggaaagacctgactgtcccccagcccaacacccgtaaagagtctgtgctgaggaggattagtgaaagaggaagacctctttgcagttgagataagaggaaggcatctgtctcctgctcgtcctggcaatggaacgtctcgctgtaaaacctgattgtacattctatttactgagataggagaaaaccgccttatggctggaggtgagacatgctggcggcaatactgctctttactgcactgagatgtttgtgtaaagtcaaacataaacctggcctacatgcacattgaggcacagcacctttccttaaacttatttatgacacagagacctttgcttacgttttcctgctgaccctctccccaccattagcctgtagtcctgccacattcccctcactgagatggtagagagagtgatcaataaatactgagggaactcagagaccagtgccgatgcgggtcctccgtatgctgagcgccggtcctctgggcccagtgttctttctctatactttgtctctgtgtcttatttcttttctcagtctcttatcccagctgatgagaaatagccacaggtgtggagggactggccccccttcagggttttatgccttgggcttaggttgtaatttggcagggcagccttccaccctttggcacagagctgggtgttccaaagaccacaaggggttttaggccctggaccccggcatgttccaagactctttatattatgtcagactagcaagccctgcctcagcttttccccaacatggaacgctgttctaaaagcacccatgattcttttttttcttttttttcttttttttttttttcagatggagtttcgctcttgttgctcaggctggagtgcaatggtgtgatctcggctcactgcaacctccgcctcccgggttcaagcgattctcctgcctcagcctctcgagtagctgagattacaggcatgatccattgctcccagccacccatgtattcctgattgaaaaaatttgcttatgtcttagttctacagctgaccctctttcgctattttcaaggtcaatagctgtgtgttcacacttctgcattttataaatgttactgtgattttcttctaaggaaaaattaaatgtcaggaatcagtggcatcagaaccttgcaaaagaagtttctttagcccaggcctgtgaaagatgcttctgtaattttcaaggataggggtgataaagaccaagccttcccattagcccttccaggcccccatgtaagaattcaggcacaccttctcactcatctcagaccttctcagggtaacttggtgaaaatttccctgctctgagccccagtgagcctccctgcaacttggagatgaggggctagaccagaaaagctcaacccgagtgacccagtcccctgaaatgatcggcaaaatagtgcatgtcttggcgtggcctttcttctggcagaggggagtgcccagctgtaattagaattttaaatgggatgcagtaccccaaaaataaaattaaaaaaaattttttaaaaaaacgtgaaagaatggaagaaatagaggtgtagactcagacacagagaccatcttcgaggcctttctctgtatgaggacatcacagcaaaatctaaagcaggtcacgtcagtccctggcagggaaccctccaccagcttcccgtgttccccagaacaaaagcccaactcctcactgtggctccacagccctgtgaccagggcccctgccagtgtccagcctcctcctgggagcttgccctcatctcatgactccctctgccccagtcacatttgcttttctgttttcccagatatcaaaacccttcctgtctcaggttgctgtccctgctcttaccctatgtccctaaatgatcacggccctgtgcctttcttcttcaggtctaggctcagagatgtctcccatgccctcccaaccccatctgaagttccctctgcccatcagtctctatcatgttactcaggttttattatctctacatcaatcacatcagaatttttttttcttttttttggagacagagtattgcccgggctgtgagtgcagtctcatgatcttgggtcactgcaacctctgtttcctgggttcaagtgattcttgtgcctcagcatcccacgtagctgagattacaggtatgtgctaccacacctggctaattattgtatttttatttttatatatttttttatttttgagtctcacactgtcaccccagactgaagtgcaatggcatgatcttggctcagtgcaactgccacctcctgggttcaagcgattctcctgcctccacttcctgagtagctgggattacaaacaaccaccaagcccagttactttttgtatttttagtagagatggggtttcactgtgttggcaaggctggtctcaaacttctgacctcaagtaatccaccctcctcagccttccagagtgctggtattacagacataagccaccaagcctggctcagtttttttatttttcgtagagacagggtttcacagtgttggccaggctggtctcaaactcctgagcccaagtgatcttcacacctcagactcctaagtagcttggacaaccatgcctggctaagtttttgtatttttggtagagatggggtttcaccatgtttcaccaaactcctgagctcaagagatctatctgcctcagcctcccagagtgctgggatgacaggcatgaggcaccagacccagcatctgcatggggtttggtcagggctgggtctagggacccagggctgggtcaggaaggggagcccattccagcccagctcccactgttgcagcgtgtgtgtgggctcctctaggaaagaagtgcgagttttcctgtggcagtttatcatccctggtgcagtgggcagcagacgggaccatatttcccagggtgaggtcgcctttgtatgtgtggttgtgttccacggaggtggcgtgttgattctgagcaataaacaacatatttctaacattcaggattgacttctaaagactcttggtacgtgaggaagaaacccggaagaggaagaggagagcaaaggagtcagggatggctttttctcaggtgagatgatattttcagtggattgttctgtctccttcctttcagaaatgctgggccttggagttgggaatcttctctgagtctgaagcatcctgcctgacaggtttgctcacattcacccatgccttccctcagtccctcttatctcgcttagattccatctctcgtgatccagtgagatgaacttgggaagaggctgcactgggcatggtcttgggaagggctcacacccagacatggatggagacggggtgagggtcccatggtgtcagtgctgttggacagcagggattgttcaggggccacatctggacgtactgtcagctctctgtggaccagtattagagcagctgccaatggaagtcatgtattcatgtgcacaaagtatgtggtaaattctagaaaaggtgaccaagatcgagaaatgttttctgcctgattttataatacatttttagttttttgagtgagttactgtgtttctgactccaaaaatcttagtaattagaatggaaagttcatacacagacatgaaagatagaagatgttttattctgtcattattttaagaataggaaatcaacctgaacaatagcaggagattcattaaaccattcttagcacattacgctcatggagactgtggtgttaccgtggagaggcttgtgaaacaggtgttttcattaaacgtttttataatttttattattatgttatgataatattatattttaaatatgcagagtcttgctctgtcacccaggctgaagtgcagtggcatgatcttggctcacgggaacctccaccttccgggttcaagtgattctcctgcctcagcctcccaagtagctgggattataggcgtgcgtcaccacgcccagctaattttgttgtatttttattagcgacgggtatcaccatgttggccaggctggtctcgaactgctgatctcaggtgatctgcccaccgcagtctcccagagtgctgggattacaggtgtgaggcaccatgcccagccccaccaattattattaaatacatatttttatatttaaccatcacatgatgtatccatttgttttgtggtaaaactccaagcaaagctgcagcttagattttttgccataatgcatctcctttccctgtcacgtcctccaccctccttccagcctcactggggagccactactgtcagttctgtgccaggtgtcagagcaagtcccgttcacgtgtatttctacatcgttatgagacttatgagatgatatcgttatgagatataatcgatgagatataatggatttccatactttgactaatctagttttcatatattttcttttgagactgggtctcactgtggtgcccaggctggagcacagtgacgtgatcttagctcactgcaacctccaccctaaggctcaagccatcctcctacctcaggctcccaagtagctggaaccacaggtgcctgccaccatggctagctaatttttttttttttttttttgagatatagtctctgttgcccaggctggagtgcagtggtgggatttcagatcattgcaacctctgcctcctgggatcaagcaattctcctgcatcagcctcccatgtagctgggataacaggcatgtgccgctgtgcccagccagattttagtttctcatctttcactgtgaatgttgtcatctctgaagacatcacccgtactctgtctcatctagatacggaatgtcacttgctgtgtcaataaaagtttctgggccgggcgcggtggatcacgcatgtaattccagcactttgagaggctgagtcaggcagatcacgaggtcaggagtttgagaccaacctggctattacggtgaaaccccgtttctgctaaaaatacaaaaattaactggttgtggtggcatgcacctgtaatttcagctactcaggaggctaaggcaggaaaatcgcttgatcctaggaggtggaggttgcagtgagcgcagacagcaccagtgcactccagcctgggtgacagactgagactccacctcaaaaaaaaaaaattttagtaaaacacaactgggaagacaaaatgcggtgaaaaatcccttactcagatttgttagaacattcactgcatttaaatccatgccttcacctctcttcttctcattttctgtaaagataagaactcctctcataaccatttggttaaaatgtgttttcatttcagggtctattgacattcagggatgtggccatagaattctctcaggaggagtggaaatgcctggaccctgctcagaggactctatacagggacgtgatgctggagaattataggaacctggtctccctgggtgaggataacttccctccagaagtgggaatgtgcccttgtgtatctttgtattttctcttgtttttagatacagtgtcttgctctgtcacccagggtagagtgcaatggtgtgatcatggctcactgcagtcttgaattccttggctcaagtgattgtcccacctcagcctcccccggtagctggtacaggtgcatgccaccatgtttgggcaaattttttagtttgttttctttccagacagggtcttgctgtgttgttgaaattcatcttgatctcctgagctcaagagatcctcctcagtctcccaagtagctgagattacaggtgccaaccaccatacctaattattggcttttatttttaagatttttgcatatgtgtggccgggcttggtggctcacgcctgtaatcccagcactttgggaggccaaggtgggtggatcacgaggtcaggcgatcgagaccagcccggccaacatggtgaaaccccgtctctactaaaaatagaaaaattagccgggtgtggtggcatgggcctgtaatcccagctacttgggaggctgaagcaggaggatcacatgaacctgggaatcggaggttgcagtgagccaagatcaccactgcacatctgcctggtgacagagtgagactccatctcaaaaaaataaataaaataaaatgaaatatttgcatatgtgtgtccttaaggctaatatgagtctatgagtttcttgtagacaacatgtagttggttcctattgattcagccagtctttggtttctgaatgcagagttacttacagtggaagtattactgatggagaagaccttacccttgtgattttgttacatattatctgtgtttcttgtaggttttttttgttcttcatttctcatttactactttttgtgtttaattgcttttttgtgtagacatgctttgactcccttcttttatttacttcttttgtttgtttgtttatgatggagtctcactctgtcgccaaggctacagttcagtggtacgatcttggctcaccgcagccagctccgcctctcgggttcaaatgtttcttgtgccccagtggctcacgcctgtaatcccagcactttgggaggctgaggcaggcaaatcacctgaggtcaggagttcaaaaccagcctgcctaacatggcgaaactccatctctactaaaatacaaaaattagccggacactgtgatgggcgcctgtaatcctgctactcaagtgtctaatgcaggagagtcacttgaacccaggaggtggaggttgcagtgagccgattgcaccactgcactccagcctgggcgatagcacgagactctgtctcaaaaaaaaaaaaaaaaattccataacctgcaaaaactatttctccactagaactctgtatttatgtcagaattatttctgtgtatgttgcactttcatcaacctatatggatactgtgttttcatgcttttttcttctaaataggaaaaaaagttgaattatgaagaaaaggtacacttataacagtttatgtgtccttttatttgcctgttcatttatttatttatttgttgatgagatgaagttttgttcttgtcgcccatgctggagtgcaatggcacaatctcgggtcactccaacctccaactcccaggttcaagcaattctcctgcctcagtgtcatgagtagctgggattacagatgtgtgccaccacgcctggctaattttgtattttaatagacacaggctttctcctttttggttaggcaggtcagaaacccctgccctcaactgatccaccaacctcggcctcctaaactgctggattacaggttgaaccaccgcacccagcctgtctgtctttttatttacctttactggagaactttatatatatctgtgggttggagttactctttagacttctttcatttctttcttttttttaagatggagtctcggtctgtcacccaggctggagtgcggtggtgcgacctcagctaactgcaacctctccctcccaggttcaagtgattctcctgcttcagtctcccaggtagctgggactacaggcacatgccaccacacccggctaattttttttttttttttttttttagaaacggggtttcaccgtgtgaaccaggatggtctcgatctcctgacctcgtgatcctcctgcctcagcctcccaaagtgctgggattacaggtgtgaaccaccatgcctggccagcctcaaagtttttaaaacatgttattgctattagatggcttcaagtattgttaagatttatagtacaggctctaaacttcctttgtttaatcagatttttcagccctcggtgatgttgatgagatgctcctgttcctgtctcagtcatttcactgtcctgtcagaaatagcttagactggccacccgaggtggctcatacctctaatcccaacagtttcggatgccaaggtgggctgatcacttgaaatcaggagtttgagaccagtctggccaacatggtgaaacctcgaatctactaaatacaagaaattggccagttgtggtggctcaagcctgtaatcccagcactttgggaggctgagaggggcagatcacctgatttcaggagttcgaggccagcctggccaacgtggtgaaaccctgtctctaccaaaaatacaaaaattagctgggcatgctggcgcatggctgttatcccaagtactcactaggctgaggcaggagaatcacttgaacctgggaggtggaggttgcagtgagccaacattgccccactacactccagtccaggtgacaaagtaagactcgggctgaggcgggagaatctcttgaggcaggagaatcatgccactacactccaatgtgggtgacagagtgtgactcggtctcaaacacaaacaaaaagagaaatagcttaaactgggaggcttcagacacagaaatttatttctcatgaatttggaaagtgggaaatccaagagcaaggtgccagccaaattggttcctggtgagagcattcttcatggtttagcccagccatcttcctgccgtgtcctgacatggtggaaacaggaacaggcaacgagctctttaatatctctttttatgaaagcacaagtcctattcacgagtagtcaacacccgtgaccaaattgtctcaaaggccccatctgcagaacatccttttggagaataagaactctgaacatggcttttggccaatatgaacattcagaccaggtagcctgcatcatattttttatgtttttattgtgcaatttgatttataaaatgttttctctgatcttagtttaaaatttttcccagtgcacattctgtgttttatattttgtgcatagtgagctagataattaaggtcaacaatgcacaggtgcaatctcggcttactacaacctccacttcctgggttcaaatgattctcctgcctcagccttccaagtagctgagattacaggcacccaccaccacgaccagctaatttttttgtatttttagtagagttgggatttcaccatgttggccaagctactctcgaactcctgacttcatgatccgcctgcctcagcctcccaaagtgctggtattacagaccgtgcccggctgttagtcaattcttattccttataatgctgtgcacttctttgacctcataaatcagatggtagtgatcttaacatgtatttcagtttttatattgtgtgctggttgtaagtagaagtttggcgtttttcttaatggaattgtttagaattttgcaggttgtataaatgtacttattctttgcttcctggttttatggattacaatattttactaattaatttttatgattgtacatgaggcttttcggtatgtggtatgcaatataactgacacagtccactagctaatgtcacacagtgccaccagatgctgtggctcacacctgccatcccaggactttgagaggttgaggcgggtggatcacttgaggtcaaaagtacgaggctggcctggccaacgtgttgaaaccctatttctactaaaaatacaaaaattagccaagcatggtggtgtgtgcctgtaatcccaggtactcaggaggctgaggcaggagaatggcttcaacccaaaaggtggatgttgcagtgagccgagatcaggccattgaactccagccagttgcaacagagtgaaacttcatctcaaaaatataaaaataaaaaaaatgttttaatgtcacaacgtgccttttcttcatggatataggtaattttatgacagttattcagaaaaacattgtattaactttttttttttttgaggtagagtctcactttgtcacccaggctgaagtacagtggtgaaatcttggctcactgcaacctctgccccttgggttcaaacaattcttgtgcctcagcctcccgagtagctgggactagatgtgggccaccacgcctggctacattttgtaatcttttcttgtcttctcagtgctatgactgtttgacaatacagaatttccattgattttggttatccttacatgagcttgttgtggattatttaccaatatagtatatcgtgtggtcctttagcatttatttgtatacagtaaatatgctgtaaatatgaagaatatatacttttcattgatatgacagtgatatgttttttacaaactgttagacactttagggtcacaatggaaaaatattccttactttaggctacacatgtttgtgccctgtcaatgttttgtcacgatcttggaaatagacttccgtaaaaataatttgaagcacatgtaatcgccctttatttgttaaagaatcttatgcttttctgttcctaaactttgagggtcatgtttggaaagtttaaaataactattgttttttgtgtcgtatttacacatttcagcattatttaccatctgtacttaatttgaaagctttcggtgtttatgttttgtagatatctcttccaaatgcacgatgaaggagttcttgtcaacagcgcaaggcaacagagaagtgttccatgcagggacattgcaaatacatgaaagtcatcacaatggagatttttgctaccaggatgttgataaagatattcatgactatgaatttcaatggcaagaagatgaaagaaatggccatgaagcacccatgacaaaaatcaaaaagttgacaggtattacagaacgatatgatcaaagtcatgctagaaacaagcctattaaagatcagcttggatcaagctttcattcgcatctgcctgaaatgcacatatttcagaccgaagagaaaattgataatcaagttgtgaagtctgtccacgatgcttccttggtttcaacagcccaaagaatttcttgtaggcccaaaacccatatatctaataaccatgggaataatttctggaattcttcattactcacacaaaaacaggaagtacacatgagagaaaaatctttccaatgtaatgagagtggcaaagcctttaattacagctcactcttaaggaaacatcagataatccatttagcagacaaatataaatgtgatgtatgtggcaagctctttaatcagaagcgaaacctagcatgccatcgtagatgtcacactggtgagaatccttacaagtgtaatgagtgtggcaagaccttcagtcagacgtcatcccttacatgccatcgtagacttcatactggagagaaaccttacaaatgtgaagaatgtgacaaagctttccatttcaaatcaatacttgaaagacataggataattcatactgaagagaaaccatataagtgtaatgagtgtggcaagacctttaggcagaagtcaatccttacacgccatcatcgacttcatactggagagaaaccttacaagtgtaatgagtgtggcaagacctttagtcacaagtcatcccttacatgccatcatagacttcatactggagagaaaccctacaaatgtaatgagtgtggcaagacctttagtcacaagtcatcccttacatgccatcgtagacttcatactggagagaaaccttacaaatgtgaagaatgtgacaaagcttacagtttcagatcaaattttgaaatacatcggaaaattcatactgaagacaatgcttacaagtgtaatgagtgtggaaagacctttagccggacatcatcccttacatgccatcgtagacgtcatactggagagcaaccttacaaatgtgaagaatgtgacaaagctttccgtttcaaatcaaaccttgaaagacataggagaattcatactggagagaaaccatacaagtgtaatgagtgtggcaagacctttagtcggaagtcatacctcacatgccatcatagacttcatactggagagaaagcttacaagtgtaatgagtgcggcaagacctttagttggaagtcatcccttacctgccatcgtagacttcattctggagagaaaccttacaagtgtaaggagtgtggcaagaccttcaatcagcagttaacccttaaacgccatcgtagacttcatagtggagagaacccttacaaatgtgaagatagtgacaaagcttacagtttcaaatcaaaccttgaaatacatcagaaaattcatactgaagagaatccttacaagtgtaatgagtgtggcaagaccttcagtcggacgtcatcccttacatgccatcgtagacttcataccggagagaaaccttacaaatgtgaagaatgtgacaaagctttccgtgtgaaatcaaaccttgaaggacataggagaattcatactggagagaaaccttacaagtgtaatgagtgtggcaagacctttagtcggaagtcatattttatatgccatcatagacttcatactggagagaaaccttataagtgtaatgagtgtggcaagaactttagtcagaagtcatcccttatatgccaccatagacttcatactggagagaaaccttacaagtgtaatgagtgtggcaagacctttagtcagaagtcaaaccttacatgccatcgtagacttcatactggagaaaaacaagtgtaatgaatgtggtgaggtttttaatcaacaagcacaccttgcaggtcatcatagaattcatactggggagaaaccttagaaatgtgaagcatgtgataaagtttacagtggcaaatcaagcctcagaagacaggagaattcatactggagagaaagcttataaatgtgaagaatgtcacaaagtttacagtcgcacatcaaaccgtgaaagacaggagaattcatactggagagaaaccataaaaatgtaagagtttgtgacaaggcttttgggcatgattcgcacctggcacaacatgctagaattcacactggagagaaaccttaccagtgtaatgagtgtggcaaagcctttagtaggcagtcaacacttgtttaccgtcaggcaatccatggtgtagggaaactttactaaggtaatgattgtcacaaagtcttcagtaatgctacaaccattgtgaatcactggagaatccataaggaagagagatcatactagggtaataaatgtggcagatttttcagacattgttcataccttgcagttcatcggtgaactcaacgctggagagaaaccttacaaatgtcatgactgtggcaaggtcttcagtcaagcttcatcctatgcaaaacataggagaattcatacaggagagaaacctcacatgtgtgatgatagtggcaaagccttcacttcacacctcatgagacatcagagaatgcatactggacagaaatcttacaaatgtcatcaatgtgccaaggtcttcagtctgagttcactccttgcagaatatgagaaaattcattttggaggtagttggtccatatgcaatgagtagagcaaaccatcaagcattaattgacattagggtcaattcagcattgacttgagtttgtattgacttaacattgagttcaagcattaattgacattagtgtttatgttaagaggattgggccaggcacatcagcttacacctgtaatctgagcgctttgggaggccaaggtgggtagatcacttgaggtcaggagtttgagatcagcctggccaacagacgtgagccattttcccagcctgttttttgtttctttaaaaaaactgatagggatttttatggatatcatgttgaatctaaatcacattgggttattatataatcatttcacaatattaatttttccaagctatcaatatgggttgtagctcaatgtttttaatcattttgatcaatgtttgtagatttcaaggtacaaacttctgacctttgtacgtttatttctaagtatttctttaagttctccagcaaatggaagtgttttaaaattttcttttaaaattgtttattgttaaagtatggaaattcaactaatttttggtgctgatactgtattgtgcaaatccactgactatgttacttagttccagtagtattttggttggctctttgtgattttctacacagaagattatgtcatctacaaacaaatataattttacttcttactttctgatttggatgagttttatttcctctgctatttcattgctctggctgggacagccagtattgattgaatagaaggggtgagagcattcttgcatcatgtgagagcctccaggaaaggcattacattttccctgcttgactgtttactcattggtcatttcatggacggtctttctattgttgaggtaaatttccttttctgtctattttgtttaggatttctatgatgactggattttgaattttgtgaaatgctttttctctattaagatgatgtggttttcatcttttgttctgttcaagtggtatatcacattgatttgcttgaatatgttgaaccatccttgcatcccagaaataagtggcacttgaatatctacatttttttaatgtcctcttgaatacagttttctagtacaatggatcttgaagaagttcatggaaaaatacctattatgagaaaatttgcatgaattttagtttttgcaacaaaacactggtacaagtctgttatgtctgaacaggctgtagtttaaggcactcagaaggataagacatgagtttgaaaagagactctatcaaagcaatataaattctgctaaaattgaaacaagaagaaacatcaaatttacgatgagatcagatgcagtgtctcaggtctataatcccagcactttcagaggccatgacaggtgggtcacatgagcccaggtattcaagacgagcctgggcaacatggtgaaacccccttgtctacaaaaaatacaaaaattagctgggcatggtggcatctgactgcagggccagctactgtggagtctgtggtggaggatggcttgagcctgggaggtcgaggctgcagtgagctgtggtcatgccactgcactccagcgtgggtgatggagtgagatactgtctcaataaaagaataattatgggccgggcggcgtggctcaatcctgtaatcccagcactttgggaggctgaggcgggtggatcatgaggtcaggagattgagaccatcctggctaacacggtgaaatcccgtctctactaaaaatacaaaaaaaaaaaaaaattagccgggcatgctggagggtgcctgtagtcccagctactcagggaggctgaggcaggagaacggcatgaacccgggaggcagaacttgcagtgagccgagatcatgccactgcactccagcctgggggacagagtgagactccgtctcaaaaaaacaacaacagcaacaacaaaattatggtaaagtttgggaagaggaataatggaatcattgatactttatgaaaaggttatggagatgatgcccaaaagaaataaaccatttgtaaatggataactcatttcgaattgggacaagacagtgttgaaggtgatgctaggagcggcaggcagatcacatcagttttttgttttgtttgtttgtttgctttgaggcagtgtctcgatctgttgcccaaaagctacgtagaggccaggcgcaatggctcatgactgtaatcccagcactttgggaggtggagacaggcaaatcaccttaggtcgggagttcaagaccagcctgaccaatatggcgataccctgtctctactaaaaatacaaaatgagccaggtgtggtggcgcatgcctgtaatcccagctactcgggaggctgagacagcgaaggggacctgcccctccacatctgtgggtattcctcatcagatgagagactgagaaaagaaataagacacagagacaaagtataaagaaagaacagtgggcccaggagactggcgctcaacatgcgaggacccgcactggcgctggtctgagttcccttagtatttattgatcactatttttactatcttggcgaggggagtgcggcagggcaacggggtgacggtagggagaaggtcagcagggaaacaagtgagcaaaggaatctgtatcatgaataagttcaaggaaaggtactgtggatgtgcacgtaggctagatttatgtttcactttacacaaacatctcagtgtagcaaagagtcacagagcagtattgctgccagcatatcgcctccagccatagggcagttttctcctatctcagaatagaacgaatggtcggctttacactgagacattccattcccagggatgagcaggagacagaagtcttcctcttatctcaactgcaaagaggcctccctctttcactactcctcctcagcacagaccctttacaggtgtcaggctgggggatggtaaggcctttcctttcccatgaggccatatctcaggctgtctcagttgggggaaacttggacaatacccaggctttctagggcagaggtccctgcggctttccgcagtgcattgtgtccctggttaacagagaatggagaacagcgataacttttaccaagcatactgcctgcaaacatattaacaaggcacaccctgcacagccctaaatccattaaaccttgattcaatacaacacatgtttctgtgagcacagggttgaggctatagttacagattaacagcatctcgaagcagaacaatttttcttagtacagatcaaagtggagtttcttatgtcttccttttctgcatagacacagtaacaatctgatctctctctcttttccccacagaaaggagaatcacttgaacccaggaggaggaggttgtggtgagccgagattgcgccattgccctccagcctgggcaataacagtgaaaatctgtctcaaaaagaaaagaaaagaaaagaaaaaaagatatatactcccctaagaaaagaaaaaaagctatatactcccctcacaaactggggacctcaagatctccaccctaaaatagttattttgaatttccccctggcaatgtaaaccgagagcttatctgcacaggtgtgggacagaaccaatccctctgcacacctgagacaaatgcctatctgattgcttcccctgccctattgtttacataaaaacgcagggtcactgaggcagtcgaaggcataagtgactattcctcctcccgctctcacatataaattgtgtatttagtgaaaggttgatcaaagactcaaagaatgtgatcatttgttatctacctgtgacccggaagccccccaattccagttattccacctttccagactgaaccaatgcatatcttacatgtattgattgatgtattatgtctctgcaaaatgtgtaaaaccaaactgcagcctgaacaccttgggcacacattgtcaggacctcctgaggctgtgtcacgggggcatttttaaccttggcaaaatagatttctaaattgactgagacctagtagatacttttagttcacaagctcatgaacgcagaagaaattgagagaataagaaaaaagctaggtgtcatggaaagcacgaaatcagttccaaaatctgaactccttcatatttattcaacatagggaaatgctcttcaactttgtgtgattagattccatttgcgaatgatatatatttctagtatttgattaaaataacccattctatgtaattttagccaacttaaactgcaaataataaatgatcaattatatacatacataaaacttcctaatatttcacttagtattgctattactatgttcttggggcagaagctcagtctgtcagatacattacgagagactggtgtctccataattgtgcttaggactatgttgcatgaatggataaactgttaagcaggaacctaggagagctagggtgacaaagttcaagtccattaaaactagcaagacatattccttacagctcatgcacgagtcaccgtcataagatgtttatggttaaggaaagcagcttattgatacctgcaaggacaaatttctacagaaacacaatgtccagatgacccaatatcccatgacaatgtatgcttttaagatagcaggctggtctcggactcctgacctccggtgatccacctgcctcggccttccaaagcgctgtcaatacaggcgtaagccattgcgcctggccaaggatagctttaaatcaacaaagtaataagttttgttacagtgtcagcccacccgcaggtagacataccttagcttttacgtaggctttggccgggcgcggtggctcacgcctgtaatcccagcactttgggaggccgaggcaggtggatcacgaggtcaggagatcgagacaatcctggctaacacgatgaaaccccgtctctactaaaaatacaaaaaattagccgggcgtagtggcgggcgcctgtagtcccagctacttgggaggcagaggcaggagaatggcgtgaacccgggaggcggagcttgcagtgagcccagatcgcgccactgcactccagcctgggcaacagagcgagactccatctcaaaaaaaaaaaaaaaaaaaaaaagcttttacgtaggcctctatgtaagaaaaacttcaggaggaggcgttccccctgctttctgaggacgccctactgcgtaactggtagctttcaataaactctctcgcctcactacactcggaccctcgccttgaattttttactgcgcaagatccaagaactctcacatggggtgtggactgtgacaccattttaggcaacaaaacgactgaacgttatacaaaaacagacaattaatccaattctcacaaaagcaggaatttggtagtcctcatccagcatgccaagcaaagatccacactgtggagtcagcgctcacgagaacaaaggggctgacagctgggaaacatgggtggatgaagggtgaggcgctcagcagccgccaactgggattattggaaagggcaatagggtattgaaaggcggaggacacggtctaaaacgatacaaaagctgcagagccactgggcctgcgagcttcccatggggaagccgggactccctgacaactgcacaaactcgcgtggggatttcaacatcccgaagcacccagattccttctgggcgggttctggacagagagcggggacggaacgggaggggtaaaggtcgccgagggggccgggccagaacaggtgctgggtcggggagagagggtggaggcagctttggaaaccgggcctggttagagggtgggggtggggcctggaatgggagtgggcggggcaagagggaggaggctgcctgggggccgggctggacagcaggaaaaggcgggacccgagggttagcgtcatcttgggggtggggtctggaaggggttttttgttctgaagggcggggcctggagggggcgggtccggattcttttctcagctgggccgtggatgtcgcctgctctcatcctcttgccctccaggactgggtcctccgggttctgattggtggattgtttctgatgtgccatgatattacccctaatatcacagggatgcttcctgcccgttgaagttactatttcgaacaatcgaaggtaaaacaacatattgtagtgggccacctgtactgaacgttgaatcgtttttcctcttaagttgaaaatagtttcaatgcaaagagcttttttggagaaggtagagtcgcgcgtcctgcaggcggggcaagctcccctcagtctggggcagggcggtggagagggtcagggacctcggtaaaggggtggagtggggcgctggttgcagcgggcacagacaattagaacggcttattaaactaagcaaggtcctgggttgggttgtttgagtggataatggaaactgaagggtgacaagcagaactgcctattatacacaggaggtgaaggacaatttcatatttcatggaaataaagtcagggcccggagcggtggttcacacttgtaatcccagcactttgagtggccgaagtgagaggatcgcttgagcccaggagtttgagatcagcctgggcaacatgatgagacgtcgtctctaataaaaatataaaaaaatcagccaagtgtggtggtgcgcgcctgtggtcccagctgctggagcgctgaggtgggaggatcgcttgagccagggagttggaggctgcagtgagccctgatctcaccaccacactctagcctgggtgtcagagctagaccctgtctcaaacaaacaagcaaataaatgagaggtgtaattcctcctgtgaaaataaagagatttactttcctttcgtctcttttcttaggagacttatttagaaaatttgtaaatggattttgtctgtcttctgaggttttttgttgttttgtttttgttgtttgttttttagatggagttttgcttttgttgcttaggctagagtgcaattgcacgatcccagttcaccgcagccttcaacttccgggtacaagcccggtttcgaactcctgacctcaagtgattcgccatcttggcctctgaaagtgctgggattacaggtgtgaaccaccacacctggtctgaagtggtattttttagaaactaactaaaccttttttcagcttgatgacccagggatgtatttctgaaggacttgggagctctctttgaaaggcaaaatacaagggagacagtacctgtatctcagtaggaaattaaataattcatacatcaaataattccaatttaaagctatgacctttaaataattatgagcctttgaagagagaggccatttctcttactgtctcctgtctctgaagtaaaagctgaaaaacaacaggaatgaagtcagtggcaagaccagctggtgccactgatgaccaggcctgaggttaaaatattaacccccaactctaaccacatgtgctctcaatctatcatgaccctttcacgtggaaccccttacagttgtaagcccttaaaaggaccaggaactccttcttgggggagctcggttcttgagatgccagtcagccgatgctcccggccaaataaagcaacttccttctttaaccctgtgtgtgagggcttttgtctgtggctcgtcctgctacaccttgagagaaatgtgctcattcagcttgagtccagtggaatgcaggcgtaacttctacgagttttccttgccacgtgtggtggcccacacctgtaatctcaccactttgggaggtcgaggtggacagatcacttgaggtcaagagtttgaaactagcatggccaacatggtgaaaccacctctctactaaaaatacaaaacaaaaggccaggcgtggtggctcacacctgtaatcccagaaaattggaaggcttgggcgggtggatcacaaggtcaggagtttgagaccagcctgccctacatggtgaaaccccatctctactaaaaatacaaaagttagctgggctcctagctactcgagagcctgagccaggagaatcgcttgaacccgggaggcagaggttgcagtaagcagctgagatcgtgtcattgctctccagcttaggcaacagagcgagactctgtctcaaacaaaaaaaaacaatggtggcatgcacctgtaatcccagctacttgggaggctgaggcaagagaactgcttgaatctgagaggtagaggttgcagtgagccgaggtcgccccactgcactccagcctatgcaagtcttcctcttatttacaggaaaagttttcatgtaaataattagaaagactaagcaaccccagagataagacctcctgagatcattgtccctttttatggagtgataaagtaaccttccttgaagtgtatcactctgtcaccaatcaacttgctgcaacctatgcactggtcttgaatggaaaatgtgattgtcctaaagcttctgtctttccctgtgtgtgaaacctaaacgtctctactatggaacgctgatcccattcatttggagttgatgtttgccagtggctatcctcatgctttgtgttcagataaactctatatttaatcataaattctaaattttattatttactgctgacatcagtttctgtcggattttaggagcctcactacagagggcacctgtcgccatgttgtaaaactcacacttgtcaaaaaaacatgggttagggtttcttcccctcctcggcatgaagctacttagctgacacagatggttacctccattaccaagtagagccaggatgaactatgtgtgaccaagggtgttgtcaagtcctcttccctgaggactgattagtgtttatcttgaaaacatgtacttaatgggttgtatagaacagtgaagtttctttctctcttttcaacctcttagctgtttgtctatttcgcatcataatctggcctaaggcttatttattaatgaaatggttttaatttctttctctattgtcgtcgtggagatgatttctcattggggggaagactttttgtttgttttcaattatgttttctcaacaattggaaagtgaagtaaaaagtatttgttgggccaggtgcagtggctcacgcctgtaatgccagcactttgggaggccgaggcaggcggatcacttgaagtcaagagtttgagaccagcctggccaacatggtgaaacccgtctacaaaaatacaaaaattagccaggcatggtggcacgcgaatgtaatggcaggtactccggaggctgaggcaggggaatcgcttgaacccaagagggaagaggctgcagtgaaccgagatcccgttactgccctctagcctgggcgacagagaaatactctgtctcaaaagaaataagtaaataaataaagtaataaatctcttccacaaacgtgctgagacaactaactgaatatccagatggaaaagaatactgttggatccctatctcacacaatcaaaattgtattttaaaacattaaaaaaaaaaaaggaaaaaaagagacgaggaaggaagcgctgcgggagggggtgttactttgtcgctcaggctggcctggacccccaggctcagcgatcctcccgccgctgcttcctgagtagctgggacctcaggctcctgcccccgcgcgcgcatccctcccaccccggcgccccatccagcaggtggtcacctcactcctccctggcctgagcactccgtcccgcatccatggcggtggctttagggaaatctctgaagttgagcacggggtggacttgccctcctgagtgaatggagaatagaaagggggaggatttctattttgttttgtgggccgtcagcatgaaatcgtaccttccgcccaggcagggctttgcatttcacattctagtttgcatccccgttccagacaattccagggcttttgaatagtgcctcaaccttactggccggtctcgactccaaaaccctaaaacaggcgctggagcgagggtgacggactcacaggtcccaccccggccccgccctctgcgccttccaaagggcaaagtctctccgcctctcgccccgcccctgcttcgtcaggccccgcccacctcccaggtcccgcccaggcctggcttctgtcctgcgcgcagattcgcgaaaacccggaagcggatcgcgtggagtgacggtcccacggcagcgcgtgagtttggctctgtgttgtattaggtctgcacttcccaggtccctggcgcttctgtacctggggcgtggggtccccacaaacctggaaattctcagccgtcttccttcacccagagcaaattgagacgaccccgtgagagtccgggggtcgcttccttttgtgtttaaggtcgccctgaggctggtcccgtcccgggtctttctgctatagggcaatgtatacactttctatcgcgcatttttcctgctctaaacctttctctgactcctcccaccccgcgctttttgaagtcctcacccaaggggtggattctcgcccacttcggccggtggagcgcagaaccgcggccccagtcccgggaaggccgcgtcctctgtctggtcccgggatcctgcagaccccacccttgtcttaaggcgccctcgcgcccccccccccccacctccctcctcctgccgggccctgctgcttcctaggtctcccctccgcagtcacggcttcccctgagcccacgttggggaggtgcccggggcttgtcctgttgaaggaggccagcccttccacacctgtgggtatttctcgtcaggtgggaagagagactgagaaaagaaataagacacaaagacaaagtatagagaaaggacagtgggcccaggggaccggcgctcagcatacggaggaccggcaccagtgccagcctctgagttccctcagtatttattgatcattatttttactgtcctagtgaggggagtgtagcagggcaacaggtggggagaggtcagcaagaaaacatgtgagcaaaggaatctatatcatgaataagttcaaggaaaggtactgtgcccagatgtgcacgtaggctagatttatgtttctcttcacccaaacatctcagtgtagcaaagagtcacagagcagtattgctgccagcatatctcgcctccagccacagggcggttttctcctatctcagaatagaacgaatggaaatggtcagctttacacctagacattccattcccagggaccagcaggagacagaagtcttcctcttatctcaactgcaaagaggccttcctctttcactactcctcctcagcacagactctttacgggtgtccggctgggggatgtaaggtctttcctttcccacgaggccatatctcaggctgtctcagtggggggaaacttggacaatacccaggctttctagggcagaggtccctgcggctttccgcagtgcattgtgtccctggttaactgagaatggagaatggcgatgacttttaccaagcatactgcctgcaaacatattgttaacaaggcacaccctgcacagccctaaatccattaaaccttgattcaatacagcacatgtttctgtgagcacagggttggggctaaagttacggattaacagcatctcaaagcagaaacaatttttcttagtacagatcaaaatgaagtttcttatgtcttccttttctgcatccacaaagtaacagtctgatttctctttcttttccccatatcctgtgacatggggtgttcttccctgcccagctccagccccttgaaaatgcgctcccctggtatgtagccatcttactccaaaccgtcatgtgattctgtgggctaaagggatcaggagacacacgcagtagaaaacctgagaaagaaaagaatgagaaagactcataacagatggcaaagtagagaatgggtgagggatttgccaagagacaacgaaagtgaaaaaaatatatataagaaagcaggaggagaaaagcaactggagacatgcagagaaaagctagatgtacagagagatgaaggacagcaaggtagggagaggggcagcaaagagggaggctcatcagggtgagggagaggaggagggatttggagccagggcagacagagcagagtggtgctggtggcaagaacagagggagaagcacagcagggaggacacctggggatctaggctgccagagagtggggacagggggtataacagggaagagagaatttaacggggagagcagaggaggcgcagagatggtgttgcgggaaactgaggactagagagactgctatgggggagacagaaggatgtttacttaaggtacgcaccggctcagtggatttacatctaaaaagctgagcatttcaacaaagagtggggtttttataagcaggcttacagaagcaaaataaaagcagttaatcatgtaatgattggtcacataatctatagcatagcataacttgtggccttgcatagctggtggtcttgcagctgcattgaaagaaaagcaagaacagctaaatacatttgttttctttctttctttctttctttttcttttcttttctttctttctttctttcactcttgttctaaaggggaggaggtgtctggagcccattcctttggcttcgacttcgcaaacagcgttatgttataactgttctctaagtgagcttgctaggcagaggaaaacttgttcttctctttttaacccttgccttgcctgttacttttcttggagtgaatgaatgcatattttttttttaatttctgcctgagttttctccctttgctttttataaacaagattttaatagaaagcatcactattacttgattattcatgaaaaagcaggttttcttctttaggcacaggctgatatttatatggagctattagctgagtggtagtctgcctagtgacaattgcttctatagttgattgaatgttccttaacaaggagaggtaagaggtaagggagtattaaaccaattcttagtatttctagaaccactcctgttaaggttttgaatcgactgaaggaggaaaaccagccgctaaagagggactcaggagtctactttgtctaagtctggactggaacatgggataatttttttattcttgcagttatttctataacagccttcctattgtcattgatttctaggcagcaattagttagattaaactttctacatactcctccttcctgggctaggaggtagtcgaaagctaatctattttggtagatggcatttctcatttttgtggcttgctgggccagtaagtctaatgcatttgctgtttcattagtgatgatttcaagtactgcttgcaactttatgatgcggttaagcatgtaaattggggtgcggtacctttatgacttattttgtgcccaggtagctggcctagagtactgaattagtctttcagggggccaatctgtgtctttctagtcttctatttttatgtcttttcttatgtctatatctcttttgtttttttctttaattttattgtagacaggataccttcaagtttctccctgttgcagtgggagtgagaagaaacatggtctaattgtttcaagtacacaagcccttgtcctttttcctggcaactgtcggtaggcccttggtgcacagatctaatagagaccagagggtgcttgccaggtatttggagcttcaagctgatactatgtgtggtttagagaagagaaacaggagaatgggtttggatgaggtgatctggagtcatctttgccttgccacaaagttttctttagtgttttattataatattcctgtcttaaacaagttaattcttctagggagtctgtaaaagcttttccttagtgagcaacacagtatctcctgataatggaagtttttaagagctaggggcttaaggctgggtgcggtggctcacacctgtaatcccagcactttgggaggctgatgcgggtggatcacaaggtcaggagatcaagaccatcctggctaacacggtgaaaccccgtctgtactaaaaatacaaaaagcaattagccagtcttggtggcgggcacctgtagtcccagctactcgggaggctgaggcaggagaatggcgtgaacttgggaggcggagcttgcagtgagccgagatcacgccactgcactccagcctgcgtgacagagtgagactgtctcaaaaaaaaaaaaaaaaagtgctaggtgcatcggttcgggggaagagtcagttagagttaaattatcttgtgacattaactcttttgcttcttaaggccattggtctcctatgttagtccttctacaaacataacatgagaaaatgcttaagctgctagcaatgttttcagctagccgagcaaacaggtttttagctaaaggatgatgctctcgtaacttctagtctgcatgcttatggaatgatttaaaaactcggaattgttgctggtccgggttcctttttgataacatataggtaggtttctgggtaggtgtgtgtggagacatgtatggggtaacctgcagtccacacgggtaggtctggctttagaatggtgaaatttactggatgacaggtttttgtttcacagtctggttttactggcatttcgataagcataattggcctttgttgtgtgctggggtgccacgatatgcaatactgagaatctttttctgggtcccaggggacaaggtggcatgcatacatatttgtagtcatttctatagtatctttatacaggtaggttaccacagacggatgagtctaggtctgctgctggacaagcatcaaaatacagagaaataggccatcggtaaaagggagggaccttggtttggtttaagagggaactttcttttgaccttgcatgtattttaaactattcaccaggtgaaaactttgtgttataacatacataaggttggttatttcctgggtcacaaattgagtagatggtctgattataagtacaagtctttcttttttttttttttttttgagatggagtttcactcttgttgcccaggctggagtgcaatgacatgatcatggctcaccacaacctccaccttctgggttcaagcaattctcctgccccatcctcctgaatagctgtgattacaggcatgtaccaccatgcctggttaattttgtatttttattcaagacggggttgttccatgttggtgtggctggtctcgaactcccgacctcaggtgatccacctgcctcggcctcccagagtgctggaattacaggcatgagtgaccacacctggcctttataagtacaagttcttaagcgagtccttgtacactcataataagtatggtgcagtagagtcttagttatcctgttccctgaccaggtaggtagtatgtgtacagtggggacacatttctatagttgctttttctaccatggttaaggagggtagcaacagcaaaacagtgtacagcatgttcatatccagcaaggacagaagagggccttgcctggcagaggaggttgagcacaacgacagaacaataataaaacagttagtattacaaggaaaactactagtcttaagatttctaaccacatttacttgcttgatgagtcctcaagcttcagctgtgcgtagactagtcagcttctggtgtgtgactagagcagggcttgtcccctccagcttcagctgtgcataggctagtcagcttccggtgtgtgactagagctgggcttgtcgtcccctccagcttcagctgtgcatagactggtcagcctccagagtgaccagagcagggctgtcgtcctcagcagcagcttggtctcatctcaggatcagctgagttggatggtctgggtcttgctggctggtccacttgccctgagctgccagtttcagctgactgtggtggatctacggcatgattcctgcaaatttaatagcagtgggagtggacaagattacaatatagggcccattctatatgggtcttagagaagttggattctactttttaacctaaacagagtctccaggtttaagcggtgtactggatctgtcagacttatcggcattctttctcatattcagttatgggcttcttgcatggctattattaaagcctgcatttgttttcttaaagttaattcctctagttcttggagatcacttttaatttgacttatgattggagaggccgactgaacgaactctcataaggtgaatacctagtttatttggtgggggtgcacctgactcagaggacaaccatatgaaagacctgatcttatctcaggtgagtttcttggcagtatttcttcagtagctgcttaacgtctggttcatgtattttacttttcttgaactttccggccaataggctatgtgtaacttctattttatttttagcagtcttgttaaatcttgcactatttcagctgcaaatgctggcccattgtctgactttagagatagaggcagtccaaacctgggaagaagtcttcagtcacttctcatgctttttctgtcctggtggggaaagctttaacctatcttgaaaaaggtacaaataagcactagcatataccgacatcctctgtcggatgcacggagcagttcggtaaagtttataaccaagttttcacaaggcatggctcctgcttcttgaattcttgggggccaagtgggcccccataacggttattctgagcacaggttaaacattgtttacaaatggctcaaatgacagcagagagccacagcacatagaaatggcactttcgtggccgggcgcggtggctcatgcctgtaatcctaccactttgggaggccaaggtgggcagatcatgaggtccggagttcaagaccagtatgagcaacatggtgacgtccagtctctactgaaaaaacaaaagaagtagccagtcatgatggcaggtgcctgtaataccagctactggggaggctgaggcagaagaaacacttgaacccgggaagcagaggttgcagtgagccaagattgcaccactgcactccagcctgggtgacagagcgagactcaatctcaaaaaaaaaaccagaaatggcactttcataacgttgctaatgctgtttttcttatatgagtttcttgatgagtttgcttcacaaacttaggagctaacatctttggaatggctagtctcctatcaaagaacttctactaccttcttttaatatattttttatcttcttgggcaaaccaggatctttgatttggagtataacttgggttgtcttggagaggaggttctgggaggagaggcatagctaaggcttcctctttaaaatgcagcgtgatcattgctgcctgctttgcctctctgcctttctgtttcctgtggcttctggcatccttgccatttggtgccctctgcagtgcattatagctactttctctggagcctatactgcctctaagagctgtagaatctcttctttgtactttatttcttgcctctagctgataaaagtcctctctctttatatatagttccatgtacatgcaaggtagtaaaagcatacttagaattagtgtaaatactgacttctcttttgctagcaacagtgctcttgtcagggctattaattctgccttttgagctgatgttccggtaggcagaggctgagcctctactactgagtctgatgttaccactgcatacccggcatgtccaaactcttctagcacagaactacttccacctgtgaagtacttgacatctgggtctctgaggggtctgtctgtaagatctttctcattggggaatacctcgtctactgttttgacacagttatggagaggagctgcctgttcgactgggagcagaatagccgggttagggtgtttactgttctaaaattgtgtaagggttttcacatagaagcccttggtactgagtcatcctcaggtttgataactaatggtgccttctttgatccatcaaagttatgactcagtgtggcacccagacggttagttgctgtcctagagttaatttgctagcttcctgtgttaacaagatggtggcagctaatgccttaaggcaaagaggccatcttaacaccacggagtctggttgtttggataaatgtgccactgggcgatgccacgatcctataagttgagtcagagcccctatagtcattgtttttttgttcatgaacatatagaaagacttagttatgtctcatagtcttaaggctgggacctgagttaaagcttccttgacctgcttgaagtctatttcttgattaggttttcaaaggaggggctccttttctcctctttttgtggcttcctattaacgacttagccatcagtgaacaatttggaatccggaatcttgctgcctctaaaaattcctatttgacgttgggtggccggggttggaagggcacaaatggcttgcttccactcatagccaagccagtgttccttgtggctcactatgacacctagatatatggaacctcttcaaggcaaatttgggcttgcttttttgatattttgtaacttattttctataggaaatggaagagatcctgggttccccgataacagtcctcttagattggggccggcaaaagaagctcatctgcatactgcaacaaggtgcagttgctatttggcagggtataagccatgaggtctgaagccaatgtttctctaaagattgtgggagagaaccgggcatggtggctcgcgcctgtaatcccggcacttcaggtggttggggtggctggatcacgaggtcaggagtccaagaccagaccggccaagatggtgaaacccggtctctactaaaaatacaaaaactggccacatgcggtggctggcacctgtaatcctagctactctggaggctaaggcaggagaattgcttgaacccggggggcagaggttgcagtgagctgagatggcaccactgcactccagcctgggcaacagagcaagactccatctcaaaaaaaaaaaaaaagattgtgggagagtttttttgtttgtttgagacggagtctcactctgtcgccgacgcttaagtgcagtggtgcgatcttggctcactgcaagctccgcctcctcccgcctcctgggttcacaccattctcctgcctcagccttctgagtagctgggactacaggggcccgccaccacgcctggctaatttttgtattttaagtagagacggggtttcaccttgttaaccaggatggtctcgatctcctgacctcgtgatccacccgccttggcctcccaaagtgctgggattacaggcataagccaccgcgcctggctgtgggagagtttttaaacctttgtgggagtctagtccaggtgaactgtgacgcttcattgtcttatgaaatgcaaagataggctgactaactggtgccagacagatataaaagaaagcatcctttaagtttaagactgtaaactaggtagcacttgctggagtcctatcacagtgtacgggttgggtaccactggatggatagttaccgtggcctggtttacaacatgcaaatcttgcaccagcctatattcattagaccctggccctggcaatggcttctgaactgtcaaaagtggagtgttctaaggcgactagcattggactaaaatcttatgtttatagagcctttctgaacgcttgcagatgccctgtatggatttttggggaactgggtactgacgaacctgaaacaggagttgctcctggttttgattctgctactactggcgcatgatttacagctaacccacgtgggttgtcctcagcctgtactccaggaatgtctttaactaactggaataataatttttcttctacttgagtgtgaggttgcattggtgcctgaaaaaggggttgggcacagtggctcactcctgtaatcccaccatttttggagcctggggcaaggggattgcttgagtccaggtatatgagaccagcctgggcaacatagtaagacccccatctctgccaaaataaataaataaaattaaccagatgtgatggtgcacacctgtactcccagctactctggaggccgaggcaggaggatcacttgatcccaggaggtccaggctgcagtgagccgagatcatgccactgccctccagcctggtcaacagagtgagaccctgtctcaaaagaataaaaggggtgggggactttgtgttcagatgagtgggtgagttcactgggtatgattacttgtgacatgttgacttctgtgtatataatctaataacttaaaatttgtttaaattatacagatgagattgagaacttaaaaattcctatctataaggcatgtacattgtataaatcttggcatagaggtcagcttccacttggaatccctattcagccagagagcagtgacttattcagttgtgaatcactctattcccttttcgcagggctggggtaggaagtagggcaatgaagtgggaaaaaaatgactttctgttattacataatacttttaattaaattaattaataattaatattttgggacagggcctggctctatcacccaggatggagtgcagcatgatctcttctaactgcagcctcgacctcctgggcttaagcgatcctcctacctcagcttcctgtgtagctgggaccacaggcgtgagccaccaagtcggacaagtattgtattttttttttgtagaaacgggtttcgctatgtttcccaggctggtctcaaaatcctgagctcaaaggatctttctgccttggccttccgaaatactgggattacagggatgagccaccgcacctagcctacatagtactttttaaaggggacatcaaaacgtggtggctcctgccagtaagcccagcactttgggagatggaggtgagtgggtcacctaaggtgaggagttcaagaccagcctggccaacatggtgaaacctggtctctactaaaaatacaaaagttaggcaggcgtggtggtgtgcacctgtagtcacagttactgggaaggccaaggcacaagaatcgcttaaacctgggaggtagaggttgcaatgagccgaaattgtgccagtgcactgcagtctgggtggcagagcgagtctccatctcacaaaaacaagcaagcaaacaaaaaataaaataaaaaacaaaagggacatcaaaagtacatttgttcttatgtgtaatagatttactttattttctttgtttcctcttcattgctttttttttttttcagtttgagataaattgtaggtttttgttttttgttttttgtgtttttttggcagaatcttatgcagtgacccaggctggagtgtagtggcatgatgtcagttcactgcaacctctgcctcctgggttcaagtgattcttttgcctcaacctcccgagtacgtgggactacaggcccacgccaccacaccaggccaatttttgtacttttagcagatatggggtttcaccatgttggccaggctggccttgaactcctgacctcaggtgatccacttgcttcggccccccaaagtgctgggattacaggtgtgagcaaccacgcccagctgagataaatcttagttttcaaaatttctcttttaatacataatcatggagaggaggctgcaatgccgaatggaggaggcaggaaccggagtgtgagcagtagctgggtgggcaccatggctgggatcaccaccatcgaggcagtgaagcgcaagatccaggttctgcagctgcaggcagatgatgaggagtgagctgagcacctccagtgagaagctgagagagaaaggtgggcccgggaacaggctgaggctgaagtggcctccgtgaacggtaggatccagctggttgaagaggagctggactgtgctcaggagcgcctggccactgccctgcaaaagctggaagaagcgggaaaagctgctgatgagagtgagagagatacaaaggttattgaaatctgggccttaaaagatgaagaagatggaactccaggaaatccaactcaaagaagctaagcacattgcagatgaggcagatgggaagtatgaagaggtggctcgtaagttggtgatcattgaaagagacatggaatgcacagaagaatgagctgagctggcagagtcccgttgctgagagatggatgagcagatcagactgatggaccagaacctgaagtgtctgagtgcagctgaagaaaagtaccctcaaaaagaagacaaatgtgaggaagagatgaagattcttactgataatctcgaggaggcagagacccatgctgagttggctgagagatcagtagccaagctggaaaagacaattgatgacttggaagataaactgaaatgcaccaaagaggaacacctctgtacacaaaggatgctggaccagactctgcttgacctgaatgagatgtagaatgccccagtcccaccctgctgctgctccttcctctgaccctgactccgcctgaggccagcctgcccgaagctgacctttacctgagggctgatcttcaattggaaggctgctttctcctctcaccaccccctcctcccctgcctctttttcaccaaactgtctctgcctcttcctggagattccagctgggctagaggctgagaacctttgcaaacaacatttaagggaatgtgagcccaatgcatgtctttaaaaagcatgttgtgatgtaaaaaaaaaaaaaaaaacataattacttctggaagatgcctttgtcacatcctataatcagctcacatcattttttttctgtacatttcccagttatttacctgttgaccccagaatttgttagatttttgaaagacaatttctaaatagtttctgtttgaaactagttgcatctggttcagatcaaggtctgcatgctttctagtctttattatttattgaaaacctttagtaccgaatacagaagtttgattatttcagtgcctacctggtaaagatgtcagtgaccttttaccttaacatcaaaatgtagtttaaccagttagtgtatttttcagttttctttccttatgt[450 bp omitted]tgggagtgctagaagcaaggaagcagcaagtctgggcacattccagaggccacgaggggttttaggccctggaccctggcatgttccaagactctttttatattatgtcagactagcaagccctgcctcagcttttccccaacatggaatgctattctaaaagcacccatgtattctttttttttttttttttttgagatggagtttcactcttgttgctcaggctagagtgcaatggtgtgatctaggctcactacaacctctgcctcctgggttcaagtgattctcctgcctcagcctcccaagttgctgggacaacaggcacccagccaccatgcccagctaaatttttggatttttagtagagatggggtttcatcatgttgaccaggctcgtctcaaactcctgacctcaggtgatctacccacctcaacctcccaaagtgctgagattacaggcatgatccattgaacctggccacccatgtattcttgattgaaaaactttgcttatgtcttagttctacagctgaccctctttcactgttttcaaggtcaatagctgtgtgttcacacttctgtgttttataaatgttactgtgattttcttgtaaggaaaaattaaaatttgggaatcaatggcatcagaaccttgcaaatgaagtttctttagcccaggcatatgaaagatgcttctctaattttcaaggataggggtgatgaagaccaacccttcccattagcatttccaggccccaatgtaagaagaattcaggcacacattttcactcatctcagacattctcagggtagcttggtgaaaatttctctttctctgagccccagtgagcctccctgcaactaggagatgaggggctagaccagaaaagctcaacctgaatgaccctggtccctgaaatgattggcaaaatagagtacgtgtctgggtatggcttttctcatgggagaggggagtgcccagttgtaattagaattttaaatgggatgcagtaccccaaaaataaaaaagaataaaaaaatgcaaaagaatggaagaaacagagttgtagactcagacacagagaccatcttcgaggcctttctctgtatgaggacatcacagcaaaatctaaagcaggtcacgtcagtccctggcagggaaccctccaccagcttcccgtgttccccaggacaaaaggccaactcctcactgtggctccacagccctgtgaccagggcccctgccagtgtccagcctcctcctgggagcttgccctcatcttatgactccctctgccccagtcacatttgcttttctcttttcccaaacatcaaaacccttcctgtctctggtcattgtccctcctcttactctatgtccctaaatgatcacggcactgtccctttctcctccttcaggtctaggctcagagctgtctcccatgccctcccacccccatctgatgttccctctgcccgtcagtctctatcacgttactcaggttctattatctctgcatcaatcacatcaggaatgctttttgtttttttttttttttttttttttttttgagagacagaatctcactctattgcccaggctgtgagtgcagtcttgtgatcttggctcactgcaacctctgtttcctgggttcaagtgattcttgtgcctcagcctcccaagtagctgagagtacaggtgtgtgccaccacacccagctaattattgtatttttatttttattttattttattttattttatttttgagtctcacattgtcacccaggctggagtgcagtggcacgatcttggctcactgcaactgccacctcctgggtacaagtgattctcctgcctcagcctcctgagtagctgggattacagacacccaccaagcccagttgctttttatatttttagtagacatggggtttcaccatgttggccaggctggtctctgacttctgacctcaagtaatgcaccctccttggccttccagagtgctagtattacaggcacgagccaccgtgcccggctcaatttttgtatttttagtagagacagggtttcaccatgttggccaggctggtcttgaactcctgagctcaagcgatcctcacacctcagcctcctaagtaactgggaccacagacacacagatgtgcacaaccatgcctggctaagtttttgtatttttggtagagatggggtttcaccatgttgcccaggctggtctcaaacctgagctcaagagatctacgcacctcggcctcccagagtgctgggatgacaggcatgagccaccgcacccagcctttgcatgaggtttggtcaggcctgggtctgtgccctaaaggggagctcatcccaccccagctccccactgctgcagcgtgtgtgtgggcttctccgggaggggagtgggagttttcctgtaggagtttattgtccctggtgtggtcggcagcataggggaccgtatttcctcaggatgaggtctcctttgtatgtgttgttgtgttacagggaggggatgtgttgattctgagcaataaacaacatatttctaacattcaggattgacttctaaagactcttggtatgtgaggaagaaacctggaagaggaagaggaaagcaaaggagtcagggatggctcttcctcaggtgagatgatatttttggtggattgttctgtctccttcccctcagaaatgctgggccttggagttgggaatcttctctgagtctgaagcatcctgcctgacaggtttgctcacattcacccatgccttccctcagtccctcttttctcacttagattccatctcttgtgaccgagtgacatgaacttgggaagaggctgcactgggcatggtcctgggaagggctcacacccagacatggatggagacggggtgagggtcccatggtgtcagtgctgttgggcagcagggattgttcagtggccacatgtggatgctctctcagctctctgtggactaggattagagcagctgccaatggaagtcacatattcatgtgcacaaagtacgtggtaaattctagaaaaggcaaccaatatggggaaatgttttctgcctgattttatagtacatttttagttttttgagtgagttactgtgtttctgactccaaaaatcttagtaattagaatggaaagttcatacagacatgaatgatagaagatgttttatcccatcattactttaagaataggaaatcaacctgaatcatagcaggagattcattcaaccattcttagcacattacgctcatggagactgtggggttactgtggagaggcttgtgaaacaggtgttttcaggaaaatggttataatttgtattgtcattattattaaattatgataatattattgtattttaaatatatgaagtcttggtctgtcacctaggctgaagtgcagtggcatgatcttggctcatgggaacctccatcttccaggttcaagtgattctcctgcctcagcctcccaagtagctgggattataggcgtgcgtcaccccgcccagctaattttgttgtatttttattagtgacgggtatcaccatgttggccaggctggtctcaaactgctgatctcaggtgatctgcccacctcagtctcccagagtgctgggattacaggtgcgaggcaccgtgcccagccccaccaattattattaaatacatatttttatatttaaccatcacatgatgtatatatttgttttgtggtaaaactccaagcaaagctgcagcttagactttttgctataaagcatctcctttccctgtcacgtcctccaccctccttccagcctcactggggagccgctactgtcagttcggtgtcaggtgtcagagcaagtctcatacacgtgtatttctgcatcactatgagacttaaaaaaaattctgctgtaaattaaaaaaaaatacttttttgcaaaaattagctgagcacacctgcattactacagatatctgaagatccctccaggtcaggcagttgaaagggtgattgcttcctctaggatggggcatttcctgttttcttagatctgagaggattccaccctgcccccaactgccaatgtgtccttttccagcaagatgagatccctcttcagttcaacaaaacttgctactttttatatttgtaaaaactttatatacacactcacatatacaatatacacacacatatacatctccatacatatacacacacacaaatgtatatattttgaacaacttttacagtttgaaaatctggggaaaatgacaaccctttgtattaacatctagttttttgtgagtctctgtaggtttcattattttgttgacatatatgtatgtcatgacatatatacatgtatgtcatgacatatgtatgtcatgatatatatcgtgatatatacatgcatgtcgtgatatatacatgtatgtcatgacatatatacacatacacacacaatggattttcatactttgagaaatctagttttcatgtattttcttttattttaagactgggtctcaccgtattgcccaggctggagcacagtggcgtgatcttagctcactgcaacctccaccctcaggctcaaaccatcctcctaccacaagctcccaagtagctggaaccacaggtgccatgccaggctaatttttatgtggtttttttgttttcgtttgtttgtttgtttgtgtgtttgttttgagatggagtctctgttgcccaggccggagtgcaatggtgcgattttggatcattgcaacctctgcctcctgggatcaagcaattctgctgcatcagcctcccgggtagctgggataacaggcgtgtgccaccatgcccagctggattttagtttctgatctttcactgtggacgttgtcatctctgaaggcatcacccatactctgtctcatctagatactgaatgtcacttgctgtgtcaataaaagtttctgggccgggcgcggtggatcacgcatgtaattccagcactttgagaggctgaggcaggcagatcacaaggtcacaagtttgaggccaatattgtgaaaacccgtttctactaaaaatacaaaaattaactggccatggtggtgcgtgcctgtaatatcagctactcaggaggctaaggcaggagaatcgcttgatcctgggaggtggaggttgcagtgagtggagactgtgccattgcactccagcctgggcagcagagtgagactccacctcaaaaaaaaaaaaagcataataaaacacagctgggaagacaaaatgtggtgaagaaccccttactcggatttgtcagaacattcactgcaattaaatccatgctttcccctctctcctcttctcattttctgtgaagataagaactcctcccataacaatttccttaaaatgtgttttcatttcagggtctattgacattcagggatgtggccatagaattctctcaggaggagtggaaatgcctggaccctgctcagaggactctatacagggacgtgatgctggagaattataggaacctggtctccctgggtgaggataacttccctccagaagtggggatgtgcccttgtgtatctttgtattttctcttgtttttagatacagtgtcttgctctgtcacccagggtggagtgaaatggtgtgatcatggctcactgcgatcttgaattcctgggctcaagtgattgtcccacctcagcctcccccagtagctggtacaggtgcatgtgaccatgtccggctacttttttagtttttttttttttttttttttttagagaatgttcttactgcgttgttgaagttggtcttgatctcctgggctcaagagatcctcctcagcctcctgagtaactgggattacaggcaccaacccccataactaattattggcttttacttttaaaatttttgcatatgtatgtccttaaggccaatatgagtcttctgtagaaaacatgtagttggttcctgttgattcagccagtctttgccttctgagtgcagagttaaatatttacatttgaagtattactgatggagaagaccttaccattgcatttctgttacatattatctgtattgtagattttttttgttcttcatttctcatttactactttttgtgtttaattgcttttttgtgtagacatgctttgactcccttcttatttactttttttgtttgtttgtttatgatggagtctcactctgtcgccaaggctacagttcagtggtgcgatcttgggtcaccgcaactggctctgcctctccagctcaaccgatccttgtgccccagtggctcatgcctgtaatcccagcacgtagagaggccaaggcaggcaaatcacctgaggtcaggagttcaaaaccagtctggctaacatggcaaaactccatctctactaaaaatacaaaaattagccggacactgtggtgggcatctgtaagccctgctactcaagaggctaaggcaggagagtcgcttgaacctgggaggtgaaggttgcagtgagctgagactgtgccattgccctccagcctgggcaacagaacaagactctgtctcaaaaaaaaaaaaaaaaaattccataacctgcaaaaacttctctttctccaccagaactctttatttatgtcagaattatttgtgtatgttgcattttcatcaacatatatgtatattgtgttttcatgctttttttcttttaaataatagaaaaaaagttgaattatgaagaaaaggtacacttacaacagtttctgtatctgtacttttatttgcctattcatttatttatttatttgttggtgagatgaagttttgttcttgtcgcccatgctggagtgcagtggcacaatcttgggtcactccaacctccaactcccaggttcaagtgattctcctgcctcaatttcccgagtagctgggattacaggcatgtgccaccatgcctggctaattttgtgttttaatagacacagggtttctccttttttgtctggccgatctcaaactcctgccctcaggtgatccatcaacctcagcctccgaaactgctgcgattacaggtgtgaaccaccgcgccctgcctgtctgtcttttaatttacctttactggagaactttatatatatttgtgggttggagtgactctttagacttctttcatttccttttttttcttttttttttttgagatggagtcttggtctgttgtccaggctggagtgcagtggcatgatcttggctaactgcaacctctgcttactgggttcaagtgattttcctgcctcagtcccccaagtagatgggactacaggcacatgtcaccacacccggctaattttttgtattttttttttttttgtagaggtggaggcaggatttcatggtgttagccaggatggtctcgatctgacctcgtgatcctcctgcctcagcctgccaaagtgctgggattacaggcgtgagccaccgcgcccagccgttagtcaattcttattccttataatgctgtgtatatttttgacctcataaattaacatgtagtgatcttaacatgtatttcagttcttatattgtgttctggtggtatatagaagttgtggcttttttcttaacagggaattgtttagaattctgcaggttgtataaatgtacttgttatttgcttgctagttttatgagttacaatattttactaactaatttttatgattgtacataaagcttttcggtatgtggtatgcaatataactgacacagtccactagttaatgtcatttttttttgagacagagtttcactgttgttgcccaggctggagtgcaatggcgtgatcttggctcgctgcaacctctgcctcctgggttcaagtgattctcctgcctcagccttcccgagtagctgggattacaggcatgagccaccacacccggctaattttgtattgttagtagagacggggtttctccatgtttgtcaggctggtctcgaactcctgacctcaggtgatccgcctgccttggcctcccaaagtgctaggattacaggcataagccaccgtgcctggcattaatgtcacattaactggggcactgtggctcgtgcctgtagtcccaggactttgggaagctgaggcgggtggatcattgaggtcaaaagttcgaccacagcctggccaacatggtgaaaccctctatctactaaaaatacaaaaattagccaagcatgctggcatgtgcctattatcccaggtactcaggaggctgaggcaagagaatggcttgaacccaaaaggtggaggttgcagtgagccaagattgggccatagcactccagcctgttgtgacaaagtgaaacttcatctcgaaaataaaaaaatacaaaaatttttaaaagaacgtcataacgtgccttttctgcataggtataggtaattttatgacagtaattcagaaaaatattgtattaacttttattttgagattaagtctcactttgttacccaggctgaagtacagtgttgcaatctcagctcactgcaacctctgcctcttgggttcaagcgattcttgtgcctcagcctcctgagtagctgggactacagacgtaggccaccacgcctggctacattttgtaatcgtttcttaccttttcagtgctatgattgtttgacaatacagaatttccattgattttggttatccttacatgagcttgttgtggattatttaccaatatggtatatcatgtggtcctttagcatttatttgtatacagcaaatatgctgtaaatatgaagaatatatacttttcattggtgtgacggtgatatgttttttgcaaactgttagacactttacggtcacagtggaaaaatactccttactttaggcttatacacatttgtgcactgtcagtgttttgtcgtgatattggaaatagggttccgtagagatgatttgaagcacatgtaatagccctttatctaataaagaatcttacgcttttgtgttcctaaactttgaagatcatgttggggaagtttaaaatgagtattttttgtgtcacatttacacatttcagtattatttaccatctgtactgaactggaaacctattcgtgtttatattttgtagatatctcttccaaatgcatgatgaaggagttctcatcaacagcacaaggcaatagagaagtgatccacacagggacattgcaaagacatgaaagtcatcacactggagactttcgctttcaggaaattgataaagatattcataacttagagtttcagtggcaagaagatgaaagaaatagccatgaagcacccatgacagaaatcaaaaagttgactggtagtgcagaccgatatgatcaaaggcatgctggaaacaagcctattaaagatcagcttggatcaagctttcattcgcatctgcctgaactccacatgtttcagacccaagggaaaattggtaatcaagtggagaagtctatcaacgatgcttcctcaatttcaacatcccaaagaatttcttgtaggcccaaaacccatatttctaataactatgggaataatttccggaattcttcgttactcacacaaaaacaggaggtacacatgagagaaaagtctttccaatgtaatgagagtggcaaagcctttaattatagctcactcttaaggaaacatcaaataatccatttaggagagaaacaatataaatgtgatgtatgtggcaaggtctttaatcggaagcgaaacctagtgtgccatcgtagatgtcacactggggagaaaccttacaggtgtaatgagtgtggcaagactttcagtcagacgtattcccttacatgccatcgtagacttcatactggagagaaaccttacaaatgtgaagaatgtgacaaagctttcagtttcaaatcaaaccttaaaagacataggagaattcatgctggagaaaaaccatacaagtgtaatgaatgtggcaagacctttagtcagacgtcatcccttacatgccatcgtagacttcatactggagagaaacctttcaagtgtaatgagtgtggcaagacctttagtcggaagtcatcccttacatgccatcatagacttcatacgggagagaaaccttataagtgtaatgaatgtggcaagaccttcagtcaggagttaacccttaaatgccatcgtagacttcataccggagagaagccttacaagtgtaatgaatgtggcaaggtttttaataaaaaggcaaaccttgcacgtcatcatagacttcatagtggagagaaaccctacaagtgtactgagtgtgtcaagacgttcagtcgaaattcagcccttgtaattcataaggctattcatattggagagaaacgttacaagtgtaatgagtgtggcaagacgttcagtcgaatttcagccctcgtaattcatacggcaattcatactggagagaaaccttacaagtgtaatgaatgtggcaagggttttaatcggaaaacacaccttgcatgtcatcatagacttcatactggagagaaaccttacaagtgtaatgaatgtggcaaggtttttaatcgaaaaacacaccttgcacatcatcatagacttcatactggagataaaccttacaagtgtaatgaatgtggcaaggtttttaatcaaaaagcacaccttgcacgtcaccatagacttcatactggagagaaaccttacaagtgtaatgaatgtggcaaggtttttaatcaaaaagcaaaccttgcacgtcatcatagacttcatactggagagaaaccttacaagtttaatgagtgtggcaaagcttttaattgaaaagcaaagcttgcacatcatcatacaattcatactggaaagaaacaagtgcaatgagtgtggcaagaccttctgtcacaattcagtccttgtaattcataagaattcatactggagagaaacaagtgtaatgaacgttgcaaaatttttaatcaacaagcacaccttccacgtcatcatagacttcatagtggagagaaaccttagaaatgtgaagcatgtgacaaagtttacagtggcaaatcgagcctcaaaagacaggagaattcatactggagagaaagcttacaaaggtgaagaatatcacagagttttcagtcacaagtcaaaccttgaaagacataaaataaatcatactgcagagaaaccataaaattgtaagagttcgtgacaaggctttcgggcatgactcacacctggcacaacatcctagaatttatactggagagaaaccttacaagtgtaatgagtctggcaaagccttaatgagcagtcaacacttactcaccatcaggcaatccatggtgaaggaaacttgactaatgtaatgattgtcaccaagtcttcagtaacgctacaaccattgcaaatcattggagaacccataaggaagagagatcatacaagtgtaataatcggcaaatttttcagacatcgtccataccttgcagttcattggcgaactcatactggagacaaaccttataaatgtcatgattgaggcaaggtcttcagtcaagcttcatcctatgcaaaacataggagaattcatacaggagagaaacctcacgtgtgatgattgtggcaaagcctttacttcacgttcacacctccttagacatcagagaatgcacactggacggaaatcttacaaatgtcatcagtgtggcaaggttttcagtctgacttcactccttgcagaatatcagaaaattcattttgagataattgttccaaatgcaatgagtagagcaaaccatcaagcagtaattgacattaaagtgtttatgttaagaggattgggccaggtacagtgtctcacacctgtaatcccagcactttgggaggccaaggcgggtagatcacttgaggtcaggagtttcagatcagtctggccaacaaacatgagccacttttcccagtttgctttttgttctttaacaaaaactgatagggatttttatgggtaccgtgttgaatctaaatcacattgggttatataatcatttaacaatattaatttttccaatccatcaatatgggttatatgtctgtatatgtttttaatcatattgatgtatatttgtagatttcaaggtacaaacttctcacctttttacttttatttctatttctttaagttctctagcaaatggaagtgtttttaaattttcttttaaaattgtttattgttacaaacttctcatctttttgcttttattcctaagtatttcttactttaagttctctagcaaatggaagtgtttttaaattttcttttaaaattgtttattgttaatgtatggaaattcagctaatttttggtgctgatattgtactgtgcagatacactgaatctgtttattacttccagtagtattttggttgagtctttgtgattttctacacagaagatcatgtcatctacaaacacatataattttacttctttctttctgatttggatgggtttgatttcttttgctatttcattgctctggctaggacagccagtatttattgaatagaaggggtgagagcattcttccatcatgtgagatcctacaggaaaatcattccatgttccctgcttcgttatctactcgttggtcatttcatggatggcctttctattgttgaggtaaatttccttttctgtctattttgttcagaatttctatgatgagtggattttgaattttgtgaaatactttttctccatctattgagatgatgtggttttcatctttcattctgttcaagtggcatatcacattgatttgcttgactatgttgaaccatccttgcatcccagaaataagtggcacttgagtatctacagtcctttttacatcctcttgaatacagctttttagtacaaggggtcttcaagaagttcatggaaaaatacatattttgcatattatgagaaaattgtgtatgaatttcccagtttttgcaccaaaataaactggtacgaatctgttatgtctgaacaggtcctagtttgaggcacccagaaggataagacatgagttttaaaagagactttctctgccgggcgcagtggctcatgcctgtaatcccaacactttgggaggccaaggtgggtggatcacctgagatccagagttcgagaccagcctcaccaacatggagaaacagcatctctactaaaaatacaaaattagccaggcatggtggcaaatgcctgtaatcccagatactctggaggctgaggcaggagaatggcttgaacccgggaggcagagattgctgtgagccgagattgcaccattgcactccagcctggtcaacaagagcgaaactctgtctcaaaaaaaaaaaaaagaaaagaaaagaaaagagactctatcaaagcaatataaatcctgctaaaattgaaacaaaaaggagcatcaaatttacagtgagaccagatgcagtggctcaggcctgtaatcccagcactttcagaggccaagacaggtgggtcatgtaagcccaggtattcaagacaagcctgggcaacatggtgaaacccccttgtctacaaaaaatacaaaaattagctgggcacggtagcacatgcatgcagggccagctgctgtggagtctgtggtaggaggatagctcgagcctgggaggttgaggctgcagtgagctatgatcatgccactgcattccagcatgggtgatggagcgagatactggctcaaaaaaaaaaatacttcttgtaaagtttgggtagaggaataatgaaatcattgatgctttatgaaaagattatggagatgatgcccagaagaaataaacagtttgtaaatggataacttagtttgagttgggacaagacaatgttgaaggtgatgcatggagtggcaggcacaccatccacatcagtttttttgtttgtttttgttgttgttgtttttttgagatggtgtctcgctctgtctcccaggctggaatgcagtggtgcaatctcggctcactgcaacctctgcctcccgggttcaagtgattctcctgtctctgcctccttagtagctgggactacaggcgcgtgccaccacatcagctaatttttgtatttttagtaagacggggtttcaccatgttggcaaggctggtcttgaactcctgacctcacgatctgcccacctcagcctcccaaagtgtggagattacaggcatgagccaccatgccccttgcacatcagttttacaaaaaaatttatcttgtttgtgccacaatgaagaggactgacaggtaacagcagaaacaatagtcaggagtttgagaacaggctgattaacatggtgaaaccccgtctctactaaaaatacaaaaattagctgggtgtggtggcgggtgcttgtaatcccagttactcaggaggctgaggctgcattatcgctttaacctggggggcggaggttgcagtgagccaagatgggggcaataagagcaaaactttgtctcaaaaaaaaataaataaataaaaaataaaatatgtcaagccccttctcttcctgtctcctctcgtggtgtgtacttgactccccttctcgccagatctcacaggactttcagatttaagcaatacctggccaagaaacaaaagcaaaatcattccattcccccagtggattcagatcaaaactggtaataaaatcaggtacgactccaaaaggagacattggagaagaacgaagcggggtctataaggaattgcacgtgagatggcacacatatttatgctgtgtgagcattacaatcgcgttaccatatcaagctgaaaatgtcaccactatctggagtgttggaaatgttttattgggaatatgttttttctctgaatctgctatgaacacgtcagttgggtgggttcagtaataaatatgtgagacttttcatttcaaaataaaaaaggcaaatgatgtaattgcatagagtaccttaatttctgttttgcttttttttttttttttttttttgagatcaagactccactgggtcagctgatcacacctgtggtcctcgcactttgggaggctgagatgggaggattgcttgagaccaggagtctcctgggaatgttctcatctcccctaacccaattcatgagagacccttggactttactgttatggaaaaatctatattaagcaatatcagtgtgtcaaagcattatgtctgtcacaagctcgtgaaaggaaaataaaaattactaagccaaagagaaaagtcaacctgagaactgcatcagacaaacctgcctcccattttattcctaaatgagatagccacaaagactaaaataaagctacgtagaggccatgcacggtggctcatgcctgtaatcccagcacttttggaggccgaggcgggtggatcacttgaggttgggactttgagactagcctgacgaacatggagataccctgtctctactaaaaatacaaaaattagcggggtgcggtggtgcgcgcctgtaatcccagctacttgagaggctgaggcaggagaattgcttgaacccaggaggcagaggttgcagtgagccgagattgcgccattgcactccagcctgggtgacagagtgagactccctctcaaaaaaaaaaaacttccagcaaacatcatatgttataataatcctttgccacagaagagactcaggtatgataagttcctacgtggagaacaaaatatgagtttctactcggtcctcaggtgccttcccagagatgcccccacattttcctacagcagtggggatgtaggatggactgaccctccccaccacacacacacacacacacacacacacacacacacacacacacacaccctggggaaaagcccatataaagcagttcccatttccctccacaaactgcgggctcccagtgaaaactaccttagacattcttgcaaatcccattcttgtctggccttctacgggatgacaggggcctagagaaggcagtactgggtggagttacctgggtgcgcatttgtcgggatgtggcattttatggctattctaaggtctgttatcagttgtctgtcttggggagaatgtgcagtcgccatggtccaataatcctctatccaaggaccacacaggtcaccgcaggcgctcaatcagcgtgatccacatggtatgatgtgtgctctggcagggcacagacggacacactcagctctgtcaatgtgtaaacagggagtgttgcaatgacatggtttattcacagtcaccatggaatctgatgtggcattttaaaaaatgcgtagatctgttgcaactggtatgaaaacatcacttgtggggaaaagaaagagagatcagactgttactgtgtctatgtagaaagaagtagacataagagactccattttgttctgtactaagagaaattcttctgccttgagatgctgtgaatctgtaaccctagccccaaccctgtgctggcagagacgtgtgctgtgttgactcaagatttaatggatttagggctgtgcaggatgtgctttgttaaaaagtgcttgaaggcagtatgcttggtaaaagtcatcaccattctctaaactcaagtatccagggacacaaacactgcagaaggccgcagggacctctgcccagaaaagccaggtattgtccaaggtttctccccatgtgatagcctgagatatggcctcgtgggaagggaaagacctgaccatcccccagcctgacacccgtaaagggtctgtgctgaggaggattagtgaaagaggaaggactctttgcagttgagataagaggaaggcatctgtctcctgctcctcctgggaatagactgtcttggtgtaaaacccaattgtatattatatttactgagataggagaaaaccgccttagggctggaggtgagacatgctggcagcaatgctgctctctattacaccgagatgtttgtgtgcgtacacatgaaggcacagcacctttccttaaacttatttatgacacagagacctttgctcacatgttttcctgctgaccttctccccactattaccctattgtcctgccacatcccctctcccagatggtagagataatgatcaatactgagggaactcagagaccagtgctggcgggtgctccatatgctgagcgccggtccactgggcccactgttctttctctatactttgtctccgtctcttatttattttctcagtctctcgtcccacctgacaagaaacacccacaggtgtggaggggcaggccaccccttcatcactgattggccgggcgcagtggctcacgcctgtaatcccatcactttggaagatcgaggaaggcagaccacctgaagttgggagtttgagaccagcctgaccaacatggtgagaccccatctctactaaaaatacaatatcagctgggcgtggttgcgcatgcttgtaatcccagctattagtgaggctgaggcgggagaatcgctcgaacctgggaggcggaggttgcggtgagctgagcttgcgccattgcactccagctgggcaacaagagtgaaactccatcttaaaaaacaaaaaaacaaaaaaacaaaaaaccccatcactgattggtgaaagctattgaattagaaatgtaactctgcaaatatatatttaaatattgaataatgaatatctgaatggtgtgtatatacatatatattttgtatgtgatttcagatgcaattttagatattctatgaaattgatattagatattctatgatataaatggttgctttttattttagtgtttaaatgttttatcgttacatttgttcagatgtgtattttctatttatgaattgccacggtttagccagcagtttactacagcactcatttattttctcacagttcatagatgagaaatgtgtcaggtttttctgggtactctgtctggtctcacaaggccaaaatcaaagtcaaagccatgggttctattctagagactgtgggggcagaattcacttctaagctcattcagattgttgtcagaattcatttctttctcctggttcccatatattcaatatacagcatgtgaaatcactctcgtgctcctgagtcctaacttcctccactattgcatctctctgacatatatttcttctttaaggacacataggacccacccagataatccaggataactttcttttatttttcttttcttcttctttttttttttttttttttttgagcctgtcttgctctgtcgaccaggctagagtgctgtggcaggatctcggctcactgctacatccacctccaggttcgagcgattctcgtgcctcagcctccagagtagctgggattacaggcactccccaccatgcctggctaatttttgtatttttagtagagatggggtttcaccatgtcggccaggctggtcttgagctcctgacctcaagtgatccgcctgcctcggcctcccaaaatgctgggattacacacaggtttctctttcaaagtcaaatgaagctgggcatggtggtgggtgcctatatcccagctactgaggaggctgaggtacgaggaacgcttgaacctgagaggcggaggatgcagtgagccgagatcacgccactacactccagcctggtcaattgagcgaaactcagtctcaaaaaaaaaaaaaaaaaattcaaatgactgttagccttcattaatcagtaaattaccagccaaacttttggcaacataacataaacacaggagtagcaccaggagttggagacctggctacaacatcataggaccagtaaactttttggcactgagaaaataatatgtcaatctagctagaaaattattatcatttgggatatttctgttaagagaaactggtatactatatattactaaactatattggtgatactgtatttaacatagttatataactaaacatcaatataattatatagtaatatgtatttaaatattgttaaacaatgtttctatgaaatttctatataatttggtattcagttgtgctcacaagtccatttatttatgtatttatgtatttatttatttattttctgagaccaagtcttgctctgtagcccaggctgggcagcagtgttgcgatcttggctcactgcaacctctgcctcccgggttcaagcaattctcctgtctcagccttccaagtagctgggaatacagtcgcatgccaccacgcccaactagttttgtatttttagtagagacgggatttcagcatcttggccaggctggtctcaaactcctgagctcaggtgatccgcctgcctaggcctcccaaagtgctagcattacaggcgtctgccaccacacccggccatatctggacttcttatatacctccttctactgcggactctacctgtcaaactgaaatagaaaatactcacctgacccacccctctgtctggatggtgagctcagtgtgctggtcatgccagtcagcattatatgagagggcagcagccaggctgctagatatgggcttgtgattctgtgacctcacctgctgtcacaaccgcaatgatcattttacctgtcacagctgtgacagtgcagtcctgggaagctattcttttttaaaaacttcatttccctgttgtaattaccaagaaaacgtttactaattcctagatagcatctccaaagggattttggagtgtctggggagattctttcttcttgatccctggaggcagagagggtctcacaagaaggaagcaggaaatactgagctctggtacatcagggactgaacgcacaccaggtatgtctcagtggattctctgaatccctgagaagtctttccacccaaagtagatttccttataatatttagacctttgatcttttaagttatatgcagataaatggaatcaggcaaagtacctaagaaggattttgagagataaaaaaaaaaaagtaaaaggaagaacatgaagccattagttcacattagaaattttggaactcaccactctgtcttccagaaaatagacctaaagacagatataccatttgacccagcaatcccattactggatatatacctaaaggaatataaattgttctattataaagacacatgcatgtgtatgttcgttgcagcactattcacaatagcaaacatgaagtcaaccaaaatgcccatcactggtggactgggtaaagaaaatgtggtacctatacaccatggaatactatgcagccacaaaaaagaacgagatcatgtcctttgcagggacacggatggagctggaggccattttccttagcaaagtaacacaggaacacaaacccaaatgccacgttctcatttgtaagtgggaggtaaatgatgagaagagagatgcatagaggggaacaacacacactaggaccaattggagggtgcagggtgaaagaagggagaggatcagggaatatgactaatgggtactagaattaatacatgggtgattaaatgatctatacaacaaactcccatgacacacgtttacctatgtaaccaacctgcacatgtacccctgaatttaaaagtcttttaaaaatgaaggaaatctcacttaatctccaaatctaccatttcaatttatcaaatgcacaagatcccatggcttacagatttaattttccatatatattctatattaacacctttgacaaatctcaacacttactattttagttaatttatatactcattaatttatgagtatatgaactgaaaagaatgataatttctacccgactctattttatgatcctttagtatgtcacattacgtagttaggacatgatatcagattgtccattaattcctgtggtaggtgccatcgtactttctttcctggtgtaaaaagaagtaagtctctgtggctatcctgatatggggtcaatctttttaaatctaatttagtcgtgaggcagattcctataattttatactccaatcagtgtatctacattttatcaaggtctttaaagatttattcataattgctatcagtctatgggctaatattttatacatcaatggaaactggtcaaaaccaaaattataaaattaaatgtcacctgcgtaaaatatagagacaaggtataaaatagaaattaaatatgtggccgggcgcggtggctcacgtctgtaatcccagcactttgggaggccgaggcgggcggatcacgaggtcaggagatcgagaccatcctggataacacggtgaaaccccgtctctactaaaaatacaaaaaattagccgggcgaggtggcggtcgcctgtagtcccagctacgcgggaggctgaggcaggagaatggcgtgaacccgggaggcagagcttgcagtgagccgagatcgcgccactgcactccagcctgggctacagcgagactccgcctcaaaaaaaaaaaaaaaaaaaaaaaaaattaaatatgtatgttcattattggaagaaccccgctaactggctttgacagtagagcatggtggttaatgcactctgaaatcagcccagacaagatcagtccctattctactccaaacacggtgtgaatttacacaaatcatgtcacctctctgtgcttgagtcctctttgtctttataatggtggtacctggctcatagattatgaagaatatggaggtgaatacatgtctgttcttcatagcaaagagcaattcattgcaaatacacttaaaatgggacacatccaaatatggcaaactcttcatactagaaagtaactttattaagtatttctattgcatttcagctgactttattttttatttttattttttatgttttgagacagggtctcactttgtcatccagcctggtgtgcagtggcgggatctcggctcgctgcagcctcaatctcctgggctcaagggatcctcctacctcagcccccaccaagtaccagctgccttttaaatgtcgctcatgcatcacgttccctgcaggatcctgtgtctctgaagataagtagcagcctgtgggaactgacagaatggctgctgggatgtggccatgggaacgatcttcttatcgcagactgtacttggaatcctggggatttctctcttatttaccattatctgtccttttacatcactgggtgcaggttaaggtccacagatttgatgatcagacacctaattgtagccaacaccgtattcctcctccctagaggagtcccacagacaatggcagcttttgggtttaggcatttccggagtgattctggatgtaaatttcttttttgtgtccacagagttgtcaggggagtgtccattggcagcacctgcctcctgagtgtctcccaggccatcaccatcagccccaggagctcaggtgggcagagcttaaagggaacgcccccaagcacgctggctcctgtgtgttcctcagctggctcctccctggtcaatatcattgttctcatgcacgtgaccggcaagtggagcaacaaaaataccacaaagacaaaagatctgggatactgttctgctgctgatcacgaggacaccagagagtcgctgacgcggcactgctgtccttccctgatgtgatctgcctggggctcatgctctggggcagcagctccatcgtttgcatcctgcacaggcacaagcggcgggtccagcacattcataggaccagcgtctcccccacatcctcccctgagtccggagctaccaaaaccatcctcctggtgagcacgtttgtgtccttttacactctctcttcacctttcaagtttgtttggctcttttgaataatcccagtcagctggtggtgaacatctctgcaatgatcagtgcaggtttcccagctgtcagcccctttcttctcatgagtggggactcctgtgtatccaagctttgctttgcttagataagtaacacaaaaccccctaatcttatcagaaatatgtgaattggacatgtttgtacaatgtttatgtttcttcattgatctctagagacccataaacacggttatgaaacgaggcttgttagtgctgtgcttgccagcaggggccactgttttattctgtacctcctgatcccccctccacccacaccgccctggagcagctctgtggaaaaagtggaatcagcttagaggttttcgggaggaagacactgaaacgtaaacgttataagaaagtgacggtgcacaaacacacgtgcctcatctctgtgtccctcggagtagacggggggaatgtgcgcagatgcgaagttcttgctgtcattttcgtgatgaatagtaaaatatatattttctcagatccagaaatctcatgccctcagtcaacatccataaactgacaatcttacttgttggcttgcaagtaaggttaaaatttaaaaccttttgcaatttctgataggtttggtgatgctgggacagatgtgactttgtgtaagaggaaggtagaaaggttcttcaccggtgtggttagcggacagaaaacggctttctggaacaagcagcaaattctctcacccaaactggagtgaaatgagagtaaaattcctccactctctaaccctggaatggggctgttgtgtgagagggaggattgaaatgaactgtccgaatgtgatttatttgttgctcattctcctcctggcaggagcaggaaaggacgaagagtccccgaagctgatgctgagttcatggggttgagctgacagcggccaacaggctgtcataaactgtaagcacacgaggcttgttagtgctgtgcttgccaggagggagcagtcttttttttctgtaccttctgatccctccctccacccacaccgcactacagcaggtctgtggaaagagtggaatcagcttagaggtttttgggaggaagacattgaaactccgttttttcattttgttgtgtttttgtttttgtttttagatggaatctcactctgtcccccaggttggagtgcaatggtgccatcttggctcactgcaacctccccgccctgggctccagcctcgtgccatgtttcccaggctggtctcgagctcctgggctcaagtgatctgcccgcttgtgcctcccaaaatgctgggattacagacgtgagccaccatacctggactgaaacacttttagtcctgttgcatgcaaggatttaagtcaccaacgtacgtggattccagcaagaagggtcagtagacgcaggggtgggtaaaggtgctaaggatggtggggtgaagtgtggctgcaaacaggcagaaagagacaagcttctggccctgaatagtcaccaaatgctggatggtgcaatgctaagaatgcagcagaggccgggcgtggtggctcacgcctgtaatcccagcgctttggaaggccaaggtgggtggatcatgaggtcaagagatcgagaccatcctggccaacatggtgaaaccccctctctattaaaaatacaaaaattagctgggcgtggtggtgggcacctgtagtcccagctactcgggtggctggggcaggagaatcacttaaacatgggaggcggaggtcgcactagccgagatcgtgcctctgcactctggcctggcgacagagcaagactccatctcaaaaaaagaaaaagaaaagaaaaaaagtgcagcgcagaccatggtctgaaaagctaaaaaagaatcacaccggctgggtgcagtggctagtgcctgtaatcccagcactttgggaggccgaggcgggtggatcacgaggtcaggagatcgagaccatcctgcccaacatggggaaaccctgtctctactaaaaatacaaaaaattagccgggcgtggtggcgggcgcctgtaatcccagctactcgggaggctgaggcaggagaatggcgtgaacccgggaggcggagcttgcagtgagcggagatcgcgccaccgcactccagcctgggcgacagagcgagactccgtctcaaaaaaaaaaaaaaaaaagaaaagaatcacacctcccccattgtcctggcccctaccacatacacactctctctctcctctctctctctctctctctctctctctctctgtctctctctctctctctctctctctctctctctctctgtctgtctctctctctctctctctctgtctctctctctctctcacacacactcctatcctagcttcctctggtctactggcccttcgcagtcccttacccatgccattgtatagtgtattatacttattagtctgtgattacacggagaaaaaatacaaaacacaaaaacaagaaacaaactcaacagacagggtttaggcagggttcccagtgagggcggaaagagggtcttttgtgctaattcaatgtcctgttcggtttctgcatcagaatagacagtaggaattgatgtgttgtgtgtttttgggcttcgtgtccctatgtaccagaggaaattattccagtctgggttgggtgcaggtagggacgtgtgagactaactctcctgccatttgccacccgttgggggcgagtcattaggattcctatgagtgcctctagcctctgatgtcccaaatcctcactatgcagatgatgttgtgtgtctcggcaggtgagaggagttgctctcaatcttcctgtgtggggtgtgatccccgccctgccagcagaggtaactgacagaacccaaagaaatgcagccttctgttttccggggcaggcttattgaaagtatgtgagcagacttacattgctcaatgatttcagtggtcgacaaaagttgtagatgacaaaatgattttgtcatctgcagcctctggaaaagggaggcagcctccacctagaggtgcctgtggggtcctagttgccctgacgcaatcctgacacaataatagtcacgctgattttgaacattatctgttactttgctgctgagctctcgtcatcaccaaatcctgtcccacagacagcttggggctccccaccttgatattccaattttgagatgggttagtccaaactctacaaaaccccccgaaagccttgcttatgacacagaaatggtgtattctgggaggaaaatggaccggcccagcaacatctcagctctaaaggaaaaatcaagatctatcatcggtgaaaattttatgcccttctccacggtctgaagcaaagctatggcattatggggtcccaaatttaccatgtaacccctaaatgcctggtccaggttcactgatgggtcagggaagtagattcctcacggtggccacagcagaggctgttcgggctcagtgccagccacgtggaacctgcagcaggggcgtttgttccgctcaacggtcagacttggggccaggtgtgggggctccagcctgtaattccagccttttgggaggctgaggtaggcggatgtcttcaggccaggagttcaagaccagcctggccaacatagggaaatgccatctgtactaaaaatacaaaaaattagctggacgtagtggcaggcacctgtgatcccagctacttcggagactgaggtgggagaatcgcttgaacatggaggttacaaaaaaaatcatcaaaactcagggttttggccactgcccacattctagctgtttgttcatccccattcaaactagagactgtctgaggaagcataccctctttgaggctgcaaactggaaacaatctcagctgctgatctaacagttgcatccgtgatttaggagtccatggtaaaggactgttttctgaagcacctgaccaaaatcaagctctggacagagcctgaatctgtctcatgcagagcttgtcactgcaggccgggcttgtggttcttggtgaaagttgatctgtttatctggcggttggggaggcccctgaccattcctggcagaatgagtgcattggacttttgacccacttctggaggtttcaatcatgtcacgccagctgactccagccgcaccacgtgacccttgaaactcattcatgtcaccttttagacttttgggaccattttcactctgacatactgagtctttaatcactaaatctactaaaaatgggccaactgtctgattttacttccttgtttcccctcttgatccatcaatgttgtttagggaatttgttgattgaatgtggctgtctccagaaggagacatccttttggatgtctcttcttgacgtgatctcttcttgacagcctccaggaatgatctcttcttgacagcctccaggatcaggatgaaatcactgggggttatgaatctatttccaaaatatgagatttctctctctgaccattccaggcacaatatgtcattctttctctgaacaggccagtctactttgcccacgatgagtggcagcccagctaaaagcgagttatgggactcaaagttagttacaattaagttttatacaaaaatctttatccctgtttcaccttgctcttagggacaaaatgtcttggagacagtaggggatcatgagaataaagatgaaattataggtaccagaatgggactgactgattctgtggagggagagggagagtgacaacctgaaacctggagagcagtcaacttaggtcctaggagcactgaagaatggagggacattcatcaccttttttccctcataatcacctccgtgagtcccagaaagagtctccctggaaatgatgttgggccaggactgtgttagtttcagttaagccagatgacagggcaggtgctgggggttcctgtgcgtttggtctccacgtcacccagaagaatcctttgggactgttccctccctctgggattctagtgaggagtgtgccctttcggtacccatctgccctccttcctctgtgagctgcgtctcctcctcctgtttttcttccacgtagagatgaatgtatgtttattcctatttggataaaccagagaaacaaatcaagtaatggaaccccagacccagcctccaacatagcctgattcttttctgttcctcttcccactgtactaatttcatcatgtcggtgcagagataccctgaggtggggtctctcagaacagattgcaacaccatacgtgtagagaaggtggttggagatggcaggagtccaatcctgccaatcctgagaatcaaagcttgtgtctgatactacaagtgtatacacaggaagtagatggatccaggaaagatcctagagcccaggaagagattatttagagcaggcaggatccctgcaggagagcagagtagcaggacacaggttcagcagccacttccgaggtcagattctcacagctaagcctctgtggtagggctgatctgcagagcaatgcagagcctgggaaagctctgatcacatgtggaagatgaaactctgggcttctattagtctgttttcccctagctacaaagaactacctgagcgggtaatttatacagaaaagagacttaactgaatcacagttccacatggatggggaggcctcaggaaacttacagtcatggcagaaggggaagcaaggtatgtcttaccattgtgaaaaggagagacagagagagtgaagaaaagcacacacttctaagccatcagatctcgtgagaacgcactatcagcagaacagcaagggggaaatccgcccccatgatacaatcacctgccaccaggcctgcccctggcacgtggggattacaattagacatgagatttgggtggggacacagagtaaaccatgttagagctcatggagaagtgtcctatgtgatggaacatcctgcttctgtgggcgtgacagtctttgctctttcttggcagagaaacacttacaatagtcacttgaggaccatgtatagataggctttctttcttctgagtttcttgaaaaaggattcagaggaaacattttacccactttcagttcgagtgatggtggggagtgacttcagtaaaaatggcagattagggaactcggggtaggagtgggagctgtccatccccagaaatctcagaaggcccagcacaacctgccagaattaacctgatcgaaacttgaacttttttttttttttttttgccatgtagctttattttaaatcagacctttatcttactatgtgttgtaaagaatcgattttgtcactttgtaatgtgtcttatgcactgcagtctatttctgagttgtgagctccacccatctatcagtctgcccatcaaccaacatgtcttacaagactagctaccctcatttcgttctttttcagagttttcttgattattcttatttgtgttttcacctatgagattcttgcaataacatccataactcccaactgaatgtatctatatttgaaccaaattaaatttataaattagcttatgagcaattgatttttataatattgattttttttacccaagtccatgctgtaacttcttatgtgtacatttgtatatttcagaaattttctatttaattcttatatacatttaacatatttgttaaaattattcctaagtatattttattttattgttattttgtaattgcatccccaccccaaatctaacttgtaaattattatctcatatatatgtaaatacctgctgcgtgtaatttaaggccatgtcatgggttcaaactgattcctaacatcaaccattcaattttccccattcactggaatgactactattccatatccacaacaagagctgttgggttgagggaaatcagggtggagatgaagcaaaagtgaagagaaaacattatctaacccacgcatgcagcaaaacaacctccctatggatcaatatgtaattatctaaagtataaaatacttagaaaatattaatatttatctcatactatacaatatggaaattataaggaaaagacaaaagaatacccaattacttatatattccctacataaaaatatatacatttatatggtaaaagattgcattatcgcagtgtaaaatgaaaataggaaaacatataacaatatgtaaaacaagtgacaatatgtatgttagatttaatatcctatagtaaaacagggtaaattaaaactataaaatagaagaaaatttaaatccaagtaaatcatatgagccaaaaactaaataaactaaataaatataatcaataagcatttaatacatcttgactcagtttagatataaaagaaagaaaaatcaaacaataacatggtggttttgccatgatgtcatcaagcgtaaaaagataacctttctcaatagagatgcgtctcaggtttgtgggtctgagtccctcatggactgcaggtgagagagtgaagagacacagccttttctcaattaaagtagaaggatataaatatatatatttatttttgctatactttataatatacaaacacatatggatgattacaccctaatatttgctgtgattctacagaaatgcatgactctcaggagacatccaaaagacagcaaatatctcacacgaaactgaatagtgaacttcatcctcaatgaaccacagagttcaccattctgagtatatcgttcaagttattttcctattttccttccgcaggttctagcatgtattaacaccgtgtgtctaaagtcatccctgctggtcatctggaggaatctgagaaggggcaggtctttcttctgactctcagagcagcaccctctgctggacagggctgggcacctcatctcaagcccaatctgatccaccaacagggtctgttatctccggtccggggaagaggtgggcctctctccatcctgggaggagcgctgagcttctccttcatccagggatgggccccagggacgcgccagtgggactgggagaagccaccctcagcagggaagacagagatgcctgcgtggccgaggcctggaaggtctgcaccatggtgcacagaggccccggagctgggtgaggccagaaagctgctctggggtcagcggggaatgtgcctgctgaatctgcaagcacctgagctacgtcttcacaaatggcctcagacctagagtgcagggagatcccctggcttttctgaagtggtggcaggtggtctcctgggtagcaggatctgggctgcttacttcccttacccagtgagggcccgcggggagctcttaagttgggcatcatgggtctgcgtgatgtggctgctgtgcccacatcagagggtttttgtttcttttccaaagtcaagctgcactaatctagaccagggatccccacccctgggctgcggaccggtccccatgggtggcctgttaggaactggaccgcacatcaggaggtgagcagtgggtgagggcgcatgaccacctgagctctgcctcctgtgagatcagcagcgccactgcatctcagaggagtgccaaccctactgtgaactgtgcatgcgaaggatctgggttgcatgctctttatgagatcaaactaatgcctgatgatctcaggtggaacagtttaatcctgaaaccatccccccgtctgtggaaaaactgccttccaccaaaccagtccctggtgccaaaaacgctgggaaccgctaatctagacagttctctgctaaggaagcacatggttgagaagcatcagaatcgttcccacggaccatgctccggagtctcagcaggctcctgcaggtgagccccactggcctctcctcttccttctggacctcctcagctttggtaatggaaagctgcatcctcttctgtccccagttcctctctgggtgtcaggatctctaaaaccctctcagccgctgagaaatctgtctgtctgtctcacagtgtgtttatccgtgcatcatgaaggaccctcatacggctgacgtgccttggctgatgcgaataacactgcagcaagcgtgggagtgcagatagctcttggaaatacccatttccttcagacgcatactcagaggtaggattgctggattgtttggtcattttgatttttaaaattaaaaagaattttaattctcatattgttttgagtaaaattaaattataacttgtaaggcaactccatgttttttagaatttttaaaaatataattgctctaccaattgactgtcccaacaacaacgtacaggggtattttttttcctccgcatcctcaccacttgttaccttttgtctttttaataatagcaatcctaagacatgtgaagtgatacctcactgtgattttgattggcattttccagatgattagtctattcaggccctttactttttttcgttgttgttgttgtttttgagatggattctcactctgttgcccaggctggagtgcgatggcacgatctcggctcactgcaacctccgccttccggggaggcgtgattagccgccacacctggctaatttttgtactttagtagagatgaggtttcaccatgttggccaggctggtctcaaactcctgacctcaggtgatccactatgcttggccttccaaagtgctgggattacaggtgtgagccaccacgcccagcccctttgctcatctttaatagggttattactattatcatatttgcttttgagttgtgggtgttccttatatattttggatataaactccttatcacgcatagggtatatatggtttaacatattttctcccattatcatgccccaatatcactaagttatatttcacagctccctcttgaacacctgaaaaaattcctaatatatttccatgtgtctgtatccaggttattgtggtttttgcctgaaaacacatttatatatgctgatattccccaataactaatatattttttctctgtttttttttgagacggagtcctgctctgttgcccaggctggagtgcagtggcacgatctcagctcactataacctctgcctcccaggttcaagtgattctcatgcctcagcctcccgagttgctgggattacagacacatgccaccacacccggcaaatttttttgtatttttagtagagacggggtttcaccatatcggtcaggctggtctcaaactcctgacctcaggtgatccacccgccttggcctcccgaagtactgggattacaggcgtgagccaccgcgcctagccctaactaatatattttaaataactttttgctcttggcacatggactaaaaccacatcactaggccttcaatgacgtccaatgtctgccatcttatttccactccagctccgccccaggcatagttgcttttctttttattgaagccttctccttttttttttttttttgagacagagtttcacactgtcgcccaggctggagtgcagtggcgcgatctcggctcgctgcaagctccgcctcccgggttcacgccatcctcctgcctcagcctcccgagtagctgggactacagaagcccgccaccacgcccggctaattttttgtatttttagtagagatggggtttcaccatgttagccaggatggtcttgatctcctgacctcctgattcacccgcttcggcctcccaaagtgctggattacaggcgggagccatggtgccccgccaaagccttctccttgccaagttaattaaagagaatgttttcttcatcaaattagaaattacatcctcagagaagctttccagtatttgtagttcttacaggccacatttattacaagtttatagactccaaacttcttcactgaacagttaataaaaaggacacaggcttattgtaaaataattcatttagtgcctgccattctgattacactagaaatttagttctcctgctccgcgttctgttatgtgactgttcaatgcattacttaaaactgcaagattgaatagagagatcagcttctaacattgatgaatgcaaaccacaagaaaccaagtctcctctgcaaaatgatgaaaacactcgcaaagtcactaaaatcaatcatttcagacttctgaaatttaccaaagccacagaacaaagtgaaaagtatctatcccacagaaagtaccaaacttcagtaagacagcagcatttgtgtcattttaacatgggcatttctgtcaccctccatccttcgttcattgtggagcactgactttgtttggttggttgtttgtttttgagacggagtttcgttcttgttgcccaggctggagtgcaatggcgcgatctcggctcattgcaacctccgcctgctgggttcaagcaattctcctgcctcagcctcctgagtagctgggattacaggcatgtgccaccacgcccggctaattttgtatttttagtagagacggggtttctctgtgttggtcaggctggtctcaaactcccgacctcaggtgatccgccttcctcggcctcccaaagtactgggattacaggcatgagccactgtgcctggctgccctgacttctttcgaagctccttttaaaccctttctgtctccatcttcatgttcaccacagtattatttgctatggccaagacacggaaacaacctaaatttccttcaaaggacaaatgggtaaagaaaatgtgatatatacacattaaaatattattcagccatgaaaacacagaaattctgccatttatgacaacaagaaaaaagctggtagatgttatgccaagagaaataaggaagacacagaaagagaaatattgcatgatattcatttcttcatttctggggaggcctcagaaacgaggtccttactaagatgtggcaggctagttttgtattttagactgctcattaaaatatgtatttattgggccgggcgtggtggctcacacccataacgccagcactttgggaggccgaggtgggcggatcgcctgaggtcaggagttcgagaccagcctggctaacatggtgaaacgctgtctctactaaaaatacaaaaattagctgggcatggggtgcgtgcctttaatcccagctactcaggaggctgaggcaggagaatcatttgaacccagcaggcagaggttgcagtgagccgagatgggccactgcactctggcctggacaacagaacgagactccatctcaaaaaaaaaaaaaaaaagtattaattgcctatggttttaaaaaatgcaagtagtttctgaaggataaactgaagactcttaaacagagcacttctgttttctgagtcaacctttcttgttcagagaatgaaaagatccaggatgcctcacctaacacccaggagggtccctgacttcctgattctaggccctaaacctatgtccaagagaaaagttacatctgtagtccagagctttttaaatatagttatccaggcccctaaacagcacaagaaaatggaagctaactccttacaacttgtgaaagagacaaagtagctgctgcttttttgttgcttattttggattaattaaagtgacatcttttttattctactttcttatttaaaaattaaaaaacaggttgtgttgacttacacacttctccataaaaatacaatatattgattcaatatgaaatgtctactttagtgccagataaattgagaatttgtataccaaattttaacaaatttgatgttctcaaaagaaacagcattattcactttgtttcagatgagactgggcttatgttcacaagtacacactcacagagatctaattccacaggcacacgtggtagagtaggctaagatcatcatggacagtaatgacttgcaatgccatttgacaaatcccccaacagagctctgtaaaaccactagaaaacgcgcacaacagcacaaccatcaaaatgaaaacacctgatgtacagagttgtatagtagttgtatagttagtagttgtatggagcacccttgacataagtaactccatcttagaaaaagactccatcttacatttcatggggcactttgccaacagggacaagatgttttgcttagtaaataaataataaggactgcatccaagcagataaggacataaacaagcacattcttccactatcagtcctccccacaggactctggccataaaagaagctgggcttcagcagctcaaaacggccatcttaactgccaaccatcctgctgtcatttgtgataagcacttgacatctgctgccaaagtttctacccacatcaaagattcttctttgcaagatcaacagacaactcagcccagaccaggagactgtttatgtcttcattactctccccacgcaggttcaagtctgctgagatttggtttatctctgatttattagggagaattggctcacacgatcacaaggcaaagtcccatgataacccatctgcaagctgaggaagaaagaagccagtagtggctcagtccaagtccagaagcctcagaagcaaggaagccaacagtgcagccttcagcctgtggccaaaggcccgagagcccccagcaaaccaccagtggtccagagataaccaggtccacacacgtttgtatctttccacagtgtcaggctttgattgatgctatttcaatcacaaaagccatgagccgcctggagttcccaaagaggcttgtgatggttaatattaagtgtcaacttgattggattgaaggaagcctaggcagctggtaaaggattgtttctgggtgtatctgtgagggtgttgccagaggagactgatgtttgagtcagtggatggagagaggaagacccaccctcgatgtaggtggacaccatgcaattggctgccagctcaggtagaacacagaaggcagaagaaggtgggatacctttgcttgctgagtcttctggctttcatctttctcccgtgctggatgcttccttctgcttctcctgcccttggacatcagattccaggttctttggtctttggactcttagacttacactggtggtttgccgggggccctgtggcctctggccacaggctgacgactgcacagttggcttccttgcttctgaggcttttggacttgaactgagccactactggcttcttttttcctcagcttgcagatggcctatcatgggactgggccttgtgatcgtctaagccaattctccctaataaacttcctttcctatagacatatatcctattagttctgtctctctggagaaccctgactaatacaaggcaattctctttggtactgccccttcacttggtagtcagagccatagacacgcaggctcaagccacttcacaagtcagtcaatattgcaaaccatacatagtagtgtacttaatcaatatatataaatgttatagattaaacatttcacaataaacaaagtaatgtttaacatcaagagaaaagagataggagaaaagggttaacaagtcagtccaaggagagtaacaaaacccttggtcagggctgggcaggcccattggtcttgcaagaagtctttgaggcttcagcagcagatgccaagtgctcatcacaaatgacagcaggacggttgcagttaagatggttatttcaagccactgaagccttgctccttttatggccacagagtcctctggggaggacagatggtggaagaatgtgcttgtttatatccttatctggttggatgcagtctttattatttatttattaagcaaaacatcttgtccctgttggcaaagtgccctgtggaatgcaagatggagtctttttctaagatggagttacttatgtcaagggtactctatacagtagtcttacccacacgttcatagaaacatacaatctcatccatgtcataatgaaggccaaaaacctcacaggcgccctcccttacctgagctccaggaggctccctgatgagtccacacaatcacaaatccagtcacacccaccaatgattctctcccaacaacagcatatattttttagggcaaagcatctcacaccccagtgtttgtctaaattgcaccatttcggaagccccctgctcttttgcagaccttggtcaaagtgaaacatttcacaggggttcaggcagtgagaaatatcctgcctaaccacctgaccacaaggcgaacaaagacccaattaaagaaacattctcatcatgtcctactgggcaaaggcccaactacaaaaaccatccctatcatatctttcttggcaaaggtccaaggaacatcctgatgagatcccaccggaaaaagggccaaaccgcctgatcataagaacatcttgtcaatatcctgccgggcagcaagccatacagcccaggcctctcccgcccataccaaggtaacactcacagagacatctgaagagccaggcagtgctcccaagtctgggacagcatcagagaacgaaacgcaaagtcctgcccttacagagagagccttggcacagacccagtcaggaccaggtcactcccgtggaacctactcaaggtccctacacacatgcctggagctccccaatctactggggggtgggggaaagggcagtgctgaaacgtccccaaaatctcacatgtaaacaccctacctaacactttctagaggcatttccagctcggggctgtatttccaagaacgctctggaggcacagctcttttctaaggagggccatgttgcatgctgggaaatttttgaacttttcccaaatcacagcttttaagctttccgggcttattattattattattattattttgagacattgtttcactcttatcgcccaggctggagtgcagtggtgtgatctcggctcactgcaacctctgcctcctgggttcaagcgattctcttccctcagcctcccaagtagctgggattacaggcacacaccaccacgcctggctaatttttgcatttttagagcgatggggtttcaccatgttgggcaggagggtctcgaactcctgatctcaggtgatatacccgcctcggcctcccaaagtgctgagattacaggcgtgatttctggtcgtttcagactacatttccttcccagaaggacgcggggacacgccttccctatggacggatcccaaatgcaagttgtaagcaattataactgtaggcccctagagcctgaaccacttttcccaggaattttttgtggtgcgccttaggagcaagcaaagtttcagggcaggagaaggccgacagggcttccagcatttgaagattctgccagtctgaaatacgctttcccagaagtctatggggggtgcagctgctctaacagtgggaggagacaccgacgaaaagcattctgacggccgcgcttccagcgctaaggattcccgcgtagtgagcatttcccagaggtctctggggcatggctccattagggccgtgtgcagttgcctgcagggaaacactgatgggcgcccttccagatacgtcgattcccgggttatgagctacatttcccagaagccctcaaggcaggacgcccttagggtcgcgtagagttgcatgctgggaaatcctgacagccgcttccaactctgtggatttccgggttatggactacatttcccagaggcctctgggtcacggctccatttgcgccgtgtagagttgcatgctgggaaacactgacgggcgcccttccagctgcgtcgaagcttctctggtttcgcattacatttcccagagggccttggggcacagtccaatgaggagcgagccgggtggccggctgaggggcgtgcttcatgctcgcgggatttttaaaaatggtttctcctggatcttatcccaactgcgcctgagaccttgtttcacctcctgatgtgctgggtgtggttaggcctcgagccgggagctatttgcctcccaggaggaagccagggcagggttccgcggggaatggcggtgagggagccactcgggacgcggaggccctaaaatgaagaagcttcggcctgaggcttcgggagcggcgagcagggaagtgggagtgtgtgtgagtgtgtgtgtgtgtgtgtgtgtgtgtgtgtgaataagccagaggctgcctggtggggccccgccgtggcccagtgactgagataattgtcttcgtctgtggggtaatgcgaacaagccccgttcccctaagccgtgatgcatgcggggttgacgcggccgggctctgtccccataaactgtgacacaggtgtgtgtagacgtctatgagggccatagcgccgggctgtaagggcatctgtaggggtgacgcagccgggctgtgtctctgcacctccgttctgtgcgaggtcaatgctggtggggtctgcagaggtggcacggccaggacgggtctccgtgtctctgaaatgtgcctttgcacttctgtcaggttgacagggacaggcagtgtccctctggtgtgagcgtctgtgggtgtgaaagggccagcgagtgtgcggctgtgactggtcgggatcgggcctgggtgcatggccttttgagtgagcacaggtgtgtgcgaccatgtcacctgtctttctagtgtctccgttgcttcctgtgccttggccttccagccatgtggtacctgctagggagcagtggtcccaaagtgacgtgagaggctctacgctattgtgaaaatgaccaagaagaaggcttcacaagtcacgagatggcagttttggagccagaagtgctctccgtgcacactacctggacgacaagaggaagtaacctcaagaatagaattccttttggggaagaaagaggtacctgacatgggaggcggggaggtggtgagaggggcagctccatgtttcagaaccccagttcctagagttttccagcatttctctgaaaaactcacatgcctgtgccctcttatttctgattgattttaactgtggtctggggacaagtgtgccctattttctttctttgttttttttttttttgagacagagtcttgctctgtcgcccagggctggagtgcagtggtgcgatctcggttcccaggttcaagcgattctcctgcctcagcctcccaagtagctgggaccacaggcgcacgccaccatgcccagctaatttttgtatttttagtagagacgggatttcaccatgttggcataggtgatctcgatctcttgacttcatgatccgcccccgtcggcttcccaaagttctgggattacagttgtgagccaccgcgcctggacgtgtgcgctattttctaacgtagcttgtgatccagaaaggtcctggtgcctcattcttatcttccttttcccctccggccagctggccttcaggaaaagcatcccggaggaggaagaagaagtgttatatgtcctaaagtaaggtttcaggtgagttagctttttgttcattcaatgatttgtatttatacaacttaagactatttactttccttgggcccatttcttcccaaatagtcatttatcccactaattcctccccaagggatgtgacagggcggtgcaggtcattcctccgtgtatactccattgacctaccctcttctaaaatgtctaaaaattgtctaagaatctgatggtacagaagagattaattctaacactttatattacagtgtggtttggtaaggaagggatttatttttgggtggaaggaaacaccagatatctttggtcttttgtttattttttattattgtagttattttttaacatggttaattttttaaatttttatataattggcaaatgacaaattgtatttattgtgtatatgtttttatatatatgtatacattatgagatgattaaatcaggctgatgaacatatccatcacctcactaattattatttttgtcatgaggacatttaaactctactctcttagcaattttcaaatatactatattttttttttattttttttttcttttgcccttgtcccccaggctggagtgcaatggcatgatctcagctcactggaacctctgcgtcctgggttgcagcgattctcctgcctcagcctcccaagtagctggaattataggcacccaccaccatgcctggctaatttttgtatttttagtagagacggggtttcatcatgttggccaggctggtctcaaactcctgatttcaagttatctgcccgcctcagcctcccaaagtcctgggattacaggtgtgagccaccatgccctgcctttgtcccaatttttaatcaaatttttttttcacactcttgagttgtgtgagtttcttatatatcgtgaatattaactgcttgtcagatgtatggtttgcaaatatttccttctactccataggttctgtcttcactctgttgattgctctgctgtgcataagttttttaatgatgcaattcatttgtctgttagccaccatgcccagccttgatttctttttcaaatagttgttagtctatagggatactattttttttttatactttaagttctagggtacatgtgcacaatatgcaggtttaatccataggtatacatgtgccatgttgttttgctgcacccatcaactcgtcatttgcattaggtatttctcctaatgctatccctcccccagccccccaactccgacgggccctggtgtgtgatattcaccaccctgtgtccaattgatctcattgttcagttcccacctatgagtgagaacatgcggtgtttggttttctgtccttgtgatagtttgctcagaatgatggtttccagcttcttccatgtccctgcaaagggcatgaactcatccttttttatggctgcatagtaatccatggtgtatatgtgccacattttcttaatccagtctgtcattgatggacatttgggttggttccaagtctttgctattgtgaatagtgccacagtaaacatatgtgtgaatgtgtctttatagtaccatgatttataatcttttgggtatatacccagttatgggattgctgggtcaaatggtatttctagttctagattcttgaggaatcgccacactgtcttccacaatggttgaactaatttacactcccaccaacagtgtaaaagtgttcctgtttctccacatcctctctagcatctgttgtttcctgactttttaatgattgccattctaactggtgtgagatggtatctcattgtggttttgatttgcatttctctgatgaccagtgatgatgagcattttttcatgtgtctgttggctgcatagatgtcttcttttgagaagtgtctgttcatatccttggcccactttttgatggggttttttgtttttttcttgtaaatttgtttgagttctttgtagattctggatattagccctttgtgagataggtagattgcaaaaattttctcccattctgtaggttgtctgttccttctgatagtagtttcttttgctgttcagaagctctttagtttaattagatcccatttgtctattttggcttttggtgccattgcttttggtgttttagtcctgaagtccttgcccatgcctgtgtcctgaatggtattgcctaggttttcttctagggtttttatggttttaggtctaatatttaagtctttaatccatcttgaattaatttttatataagatgtaaggaagggatccagtttcagctttctacatatggctagccagttttcccagcaccatttattaaaaacggaatcctttccccatttcttgtttttgtcaggtttgtcaaagatcagatggttgtagatgtgtggtgttatttctgaggcctctgttctgttccattggtctatatctctgttttggtaccattaccatgctgttttggttactgtagccttgtagtatagtttgaagtcaggtagtgtgatgcctccagctttgttctttttgcctaggattgtcttagcaatgcgggctcttttttggttccatatgaactttaaagtagttttttccaattctgtgaagaaagtcattggtagcttgatggggatggcattgaatctataaattaccttgggcggtatggccattttcacgatattgattcttcctgtccatgatcatggaattccatttgtttcctcttttattttgttgagcagtggtttgtagttctccttgaagaggtccttcacatcccttgtaaattggattcctaggtattttattttctttgtagcaattgtgaatgggagttcactcatgatttggctctctgtttgtctgttattggtgtataggaatgcttgtgacttttgcacattgattttgtaagggatactattgattttttaatgttgacgttgcatactacaactttactgaattcatttattatttctagtcattttttgatggagcttttagggttttttatatgtataagatcatgtcatctgcaaacaggaacagtataacttcttcacttcctatttgattggcttttctttttgttgcctaattgctctgcctaaggcttctagtactacattgattagaagtggtaagagtgggaatcctcgtcttgttcctgatatttcaacttttcaccattgattatgatgttagctatgtgcttgtgttatatcacctatattatattgaggtacattcctcaatacctaatctgttgagagtttttgttaggaaagcctgttgaattttgtcagatgctttttctggatctattgtgatgatcatatggattttatccttcattctgttaatgtgctatatcagatttatagatttgtatatgttgaaccatccttgcattcctgggataaatcccgcttgatcatgttgaatgatcctttttatatgctactgagttcagtttgctagtatcttgctgaggatttttgcttttaggtttatcaaaggtactggccggtgatttttcttgtcttgcagtgtccttgttgggtttggtcatgctgttcttataaaatgggcttggagatagtcccttctcttggattttctggaagagtttgagaagcattgtattaggtcttcgaatgtttggtagaattcagcagtgagggcatcaggttctggtctttcatgggagatatttattgcttattcaacctccttacctgttgttagtgtgttcagattttgtatttcttcatgattcaatcttgatagattatatattactaggaatttattcatttcttctacattattcaattttttggcgtagaaattttttttttcttttttttttgagacggagtctcgccctgtcaccaggctggagtgcagtggtgcgatcttggctcactgcaagctccgcctcccaggttcacgccattctcctgcctcagcttcccgagtagctgggactacaggcgcctgtcactgtgcctggctagttgtttgtattattagtagagacggggtttcaccatattagccaggatggtctcgatctcctgacctcgtgatccgcccacctcggcctcccaaagtgctgggattacaggcgtgagccaccgcgcctggcccgggaactaattttttttataccaggcctgcattgattgcattataagaaatataacttgctgggcgcagtgcctcatgcttgtaatccagcactttaggaggccaaggcaggcggatcacgaggtcaggagtttgagaccagcctgaccaacatggtgaaaccccgtctctactaaaaatacaaaaattagccaggcatggtggcatgtgcctgtaatcccagctacccaggaggctgacacaggagaatcacttgaacccgggagttggaggttgcagtgagagccgagattgtgcctgggtgacagagcgagactccatcttaaaaaataaaaaaaaggaaatataacttaaggaagtcctgaatttaaaaaaatgattactcaaggtaaaaaaatcagagttatgaaggtgctggtaccttgtagttattaataaatgtttgaatggataggcttgtgggaagcataacaagtgtatctcaaaaatgtccacaccctaattcatgaatgcaggaatatgtgatgttgcacggcaagggaaatttcagttgtagatggactgaagttattaatcagctaaccttaagatagggagattatcctgaattgtgccagtgggcccaatgtaatcacagggtattagaagtagatgaggggtgccagaagaagagaaagaggtgaggatttactgttaactgtatttactgttaacattttgttaacaggtatgtgtcctgtctcccactcccccactaaacacgtgtgtatgtttgtttctggaacattaaatcctgctaattgatcatgtagatgagttaaagactcttcaaatcttagtttgtgaaagaaatccaacccagccatgggtcacattacatttgtgtacatgtggagaagagagaggcaggccagttatctttctcttgctttgaaaggcttcacgtttacaccttatagaattagagatacgccatttcaaactaatcccatgacagcagattatcaagaaagcctttcagaattagattttctatgattttaatgtttctttgacagagaatgataatcagtgatatctgatgccttccaaatatacacaagtaacatttccatgattatatgtacaagtaacaaatccaaggtatatgaaatccaaatatatgaaatgactaagatggcaacaatttgaaataattacacgaatctcccatatcacatagaacacatgattcagtctcttgctaatattcttgatttggtatctcttctcagattagattctttaaacttgatttctgatgcagaatcatgtctctatttccctagttgctggtaaagagggaacattttcttacgtgtcttagaatcgtttttgctaattctgctgattcaaataaattcatgcttaacatcaggcttggaaagttatttttagttagcattcatgatattgatagctgattgagaagcacatattttagcataagaaaacagcagcctcatgtttcttttctaaaaatggattaagggatatgtaatgtcagtgatctttaataaaaacagctaacttatgtaaagtaattgttatgtattactatgttttatgtagattatcttacttgataattgagatagccatatctcatggtatttatattccagtttcaccagtgaggaaaaagacactgcgaggttagtaactgtcagagttcagaatcacaccctgaaagttgtactgcagagcctgtgttcttaatttctccaaagtacctctgcccaaattacatgtacctttttaaatctactttcttcatttggtaatacatcataaatgctttctcaattatatggatcagtatcactagtaaatgtattttatgtcatgatatagcagatcataatttatttaatctgtcctctactgtcagatatttctttttttttttctgagacagagtctcgctctgttgcccaggctggagtgcagtggcgcaatcagagcccactgcagcctccgcctcccaggtttgagcgattctcctgcctcagcctcccgagtagctgggactacagctgcctgtccccacgcctggatgatttttttgtatttttagtagagacgaggtttcacaatgttggccaggctgctctcaaacaactgacctcaggtgatccgcccaccttggcctcccaaggtgctgggattacaggcatgagccaccgcacccaacctatttttttgatttttttaaaattattctctgaaggctgggcgtggtggctcacgcctataatcccagcgctttgggagctgaggcgggtggatcacgaggtcaggagatcgagaccatcctggctaacacggtgaaaccccgtctctactaaaaatacaaaaattagccgggcgtggtggtaggcgcatgtagtcgcagctactcaggaggctgaggcaggagaatggcgtgaacccgggaggtggagcttgcagtgagccgagatcatgccactgcactccagcctgggcgacagagcaagactctgtcttttaaaaaaaaaaaaaaaattattctctggagaagtggaataatatcaattgattgcatcaatgacagtgtcctagttgtggtattacactgtagttcaatcatcattggtataaatcaggtaaaaggtaaacaggatctctctcgctgtattgtttcttacaactgcatgtgaatctttatctccattctaaagaaaattcacagagaaaaaattccctgaatattcttgcacaaacaattgtgtatgactatagctgtgtccttcagataaattttgaaaaccagtattttgagtcaaaatcaagacttgttaagtgtctgcagtacgccaaactctgtgatattagcacgaagaatgagagaataactaaaaggacacagctgctacctgtatgttgtctataacccagcaaggaggggaaactgagtagaagcagctcagggcagcctgtgatcacggactgtggggaattccaggtgatgtaccttgagaggtgctaggaagggaacatcattctgacagcacccgctcgggtaggccattcttgcattgctatcaagaaatccctgagactgggtcatttataaagattatattggctcatgcttctgaaggctgaaaaggaagcatggtatcgacatctggcatccacttggcttctagggaggcctcaggagcttttactccactttacttggaaggtgaagtgggagcaggcacgtcacatggcaaaaggaggggtaaggttgggacacagcgctggcgggaggtgcgggggatgccatgtacttttaaatgaccagattttgcaagaactcactcaccatggccaagacatgagggatctgcctccataacccaaacacctcccaccaggccgcacctccagcactggggatgacagttcacctcccaccaggccccacctccagcactggggatgacagttcacctcccaccaggccccacctccagcactggggatgacagttcaactggagatttagacggggcaagtattcaagccataccgcccacggatgtcgatttataaccaaataattctgaattcacaggttccatgtgtaggtaaatacaatttgttttataacttgtatttttctaataatgtttgatgcaaagggaagaccaatagggtaaggcgaattaatgcttgtctgctgggccatcatggcttgaaggacaagttcagaggtaaaattcacactcccctcagacgtaaaaggaagcagcctcaaaacaactgtcggtatgtacagggcatcacttggcattttggccatttttccagtcagtgctccagcacatgtggaaatatgtgtctgtgtgtgcatgtacattggcatccgcaggggtaaccgggacctgatgtgtgagtagaagacgcacttgcgtgggcgtgtgtggggttgatgtgccagctctgtccccataattgtgacaggtgtgcgagtatcttgggggcaatgggacccatgcagggtgaccatccttacagagggaggtcagctacacagtctataaccccagttaatacaatgtagaccccaggaatctctgaaacactctgatcccagtgccctctgacttctgattgtcatagatatggcctgagggcagctgtgccttatgaggtattttctaatgtaggctgcgcacctagaaagaccctagcttctcagtcttatcctcctctttcccctaaaccaacattcttacgaaaaagcacgccttgagaggaggaatcatttacccatcttaaaatcaaggttcaagtgagttacgttttattcattaaatgattagcgtttataagacaggactatttactttccttgcccctaaatattctcactataacaacttatcccggtcatcctttccaaagaggtgttgggggttcatacagggatatccctcaatgtactccccattgaccaagtctctcttctgaatgttattcatgtgcctctttggcaaactgtgtagctttttctgtgtgctctgctcttctaagaatctgatgatatagaaaaatatacctcctggagcttaacattagtgcgtgatattagaatgtggtttgctaaggaaaagattcgtttttaagtggaatcaaacaccacctatctttagtcttttccctaagcctgattttcatatcacagccagaaagtagatcgtttgagtacgtgacaaggttgtcagctttgtgaggcttttaagagtggagtttgagcaaacttctgtgtcatcaaaggcataaatgttttccaagtaatcaataaattgaaattttttctgtttactagattttctttgaagctgacagcctcagagttgtttttttccacttgctttgtgtgcacagtgagaagcaatgtggtttgattttgagtatgagttctggatctaggacagagttggcaaatttttttctgtaaaacgttcagcagtaaagggatttatgggccacatatagttctgtatttttcttctttttatttatttattcggattattgttgttttgtttattaaaatgacatcctttattttttatttttatttgataaataacaaattatgtgcttattatgtacaacattatgttttgatatgtgtgtgcattatggagtgatgaaaccaaagtgaataacatacccttcaccttactagttatcatttttgtgattagaacatttaacatctctcagcaattttcaaatatacattgttattcattatagtcaccaggttataaaatagatacgcagaatttattcctcctctctagcctttgtagccattcatctccctattcccacccctgtcccagcctctggtaaccatcattccactctttgcttctatgagttcagctttttgacacttaaataggtgagataatgcaggtggacctttctatgcctggcttatttcacttaatatgatgtcctctaggttcacccatgttatcacaaatgactggattttcctggtttttaaggcgaatagtatttaattgtgatatatgccacattttctttacccattcctctacagattaacatgtaggttgatttttttttgtttccccctggggtattgtgaataatactgcagcaacttgggagcattccttcctctacaactttttggaagagtttcagaagaatattttgtgaatatttggtagaatacagcaatgaagccatcatcaagtcctgggctgttctttgatcagaaattctgtattatttgttcaatctttttactcattactgatgtgttcagatttttctgtttattcatgattccatcttggtaggttgtgtgtttctaggaattaatcttctaggttatccaacttttttggcatctaattgttcattgtagtctctcacgattctttgtatttctgtggtatgagttgtaatgtctccattttcatttctgattttattgatttttgagtcttcccttttttgtctttgaaagtctcatggtttttcaatgttgtttatcttttcaaaaaatcaactcttagtttcattaatcttcccatattgtttatttagtctccatttatttttattccgacttttattattcctttcattactatgagtgtcatttgttctttttcgagttccttgagaagtaatgtttgtttaaggtctttctcctttcttaatgtaggtgtttattgctataaacttccctcttagaactgcttttcctgcgtttctcaagatttggtatgttgtttccttttgcatttatttcaaaatatttttaaattaaacttttaacttcttccttgacctactggtacttatcatgttgtttaatttccacatatttgtgaatttacctaaattcctcctgttattgatttctagcttaataccactgtggttgaaaagatgcttgataggatttcagttgccttaaatttcttaagacctgttatttggcctaatatgttatctgtcctggagaatctttcatgtgtgctggagaagaatatgtattctgctgctgttgggagggatgctctgtatacatctgataagtccatttggtctaaagtaaaattcaattccagtgtttccttattgattttctgctgaataagttgtcctttgtcgaaagtaggatttgaagtccccttcaattattgtattgcagtctgtttgtcccttcagatcttataatgtgtgctttatatatttacacgatccaatgttgggtacatacatatgtacaattgatacatcttcttcatgaattgatccctttataattctataatgactttctttctcttcttatagtttttgacttaaattctattttgtctgatatacgtacagttgacccttgaacaacatggagctggggcgacaactcaccatgcagtcaaaactccacatttaacttttgactccctaaaaatgtaatagcctactgttgaatggaagccttattgattacataaagtagattaacacaaatatagaatggtatatgtgttatatgcaatactcctacaataaagtaagctagagaaaagaaaatgttattaggaaaatatgccaggcatggtggctcatgcctgtaatagcagctgttatagcagccaaaacggactaagacaactgtattgctgagacacagtgaaaggtcattcaagatcagggggtgacatcttaagtcctagaagtcaaaagtctaaagtgggtctcactgggctaaaaccaacatgttgaagactgtgttgctttttggaggctctaggaggcattctctttcatggcctttcccagcttctagaggctgcccagattagctcatgaccccatcctactttttttttttgatacagagtctcactctgttgcctgggctggagtgcagtggcaccatctcagctcactgcaaactccacctcccagattcaagcgattcttctgcctcagcatcctgagtagctgggattacaggcatgcaccaccacactcggctaatttttgtatttttttagtagatggggtttcaccagttggccaggctggtctcgaactcttgacctcaagtgatccgcccacctcggcctcccaaatgctgggattacaggtgtgagccactgcgtccagccctatcctacacctttaaacccagaaaagacaagtcaagttcttcttgtatcacctcattccccacctgtttctgtcatcacatgtttctcttcttcagaactccctcacctacttttaaggaactttgtaattgcaccaggcccacctagataattcagggtaatctccgtatctgaagggtggctggttagcaatttaagtccatctgcaaccttctttatcttgccttgtaacataacatattcccaggttccagatgtaggatgtggatatattctgccagtaacaggcctgtccatcaaactttcctgaatagctagaatgtacccactcccctataacaatggtctgttttccttactaatctttttttaaatttggggctccctataattatatactttataatgggattaatgaaagcctgtaaccaaaaaaaaaaaaaaaaaaaaattattcccctaagaagcacacaaagaggaaactaaaaattacccttatttatttatttatctatttatttattaagacagagtcttgcttttgttgcccaggctggagtgcaatggtacaagctcggctcactgcaacctctgcctcccgggttcaagagatctgcctcagcctcctgagtagctgggattacaggtgtctgccacacattcagctaatttttgtatttttagtagagatggggtttcgccatgttggccaaggctggtctcgaactcctggcctccagtgatccacctgccttggcctctcaaagtgctggggttacaggtgtaagccactgtccggccgtaattacccatatttataccatctaaagataattactgttaacacttagtatgtatgtttactgtcttcccctccacctctaagcatgtgtgtgttttgtttctggaacattgaatcctattaatcatgtaaatgaggcaaaaactctccaaatcatagtttgtaaaagaaatccagcccaaccacgggtcacattatgtctgtgtgcatgtggagagaagagagataccagtcatgtttccttgctttgaaaaattaatcattgatgaatatgaaaatagtcactggataccttacaaatatggactttggaaatattcccaaggttatatgtgcaagtaacgaatattgactgtaacatttcaaaggtatatgaaatagaatgagatagcactagtttaaaatgttcactttttttttttttttcttttttgagatgaagtcttactctgtcacccaggctggagtgcagtggcgcaatcttggctcactacaacctctgcctcccaggttcaagcgaatctcctgactcagcctcctgagaaactgagattacaatctcaccaccatgcccggctaatttttgtattttcagtagagacagggtttcaccatgttgcccaggttggtcttgaacttctgacctcaagtgatccgctcaccttggcttcccaaagtgctgggattacaggtgtgagccactgcacctagctgataagaatctttaaactagattttttaaggaactatcatgtctctgtctccctagttaaaaggaaatagcagacttgttacttttatgaaaatggattgagatatgttactgattttttagtaataacagctaccttatcttaattgttatatatgactgtgtgtttcatgtggatgatcctgttcaaacagtcatacattgtactatctttcttgtggttttaccagtgaggaaactttaccacactgtgaagttaataactatcagagctcagattaacaccctcaaatcagaccacagagcctgtgttaatttcaccaaaacatgtctgctcaaattatatgtaccattttaacctacccttttcccttgttgattcttcagaagttttcttaattaatgagtcagtattattaggaaatgtactctatgtcattgtataacagaccatggtttaatctgattttcctttatcctccactgcaagattttcatttttaaaaattattctcgactgggtgtggtggctcacgcctgtaattcctgcactttgtgaggccgaggcaggcggatcacctgaggtcgggagttcgagtccagcctgaccaacatagagaaaccccgtctcttctaaaaatacaaaaaaaattagccgggcgtggtagcgcatgcctgtcatcccagctactggggaggctgacgcaggagaaccccttgaacccaggaggcggaggttgcagtgagccgagatcgcaccattgcacttgagcctgggcaacaagagcgaaactccgtctcaaaacaaacaaacaaacaaacaaaaaattattctctggaaattctgggtaacgtcagtggattacatcaatgttaatcttctggttgtggtattatatactacaatcaccagctgaggtaaccaggtgaaaggtacacaagatctctcaattttatttcttgtaactacatatgaatctaaagtctatctaattaaaagagaaaaagattttcagaaaaaaagcattttgtgaacatacttcaacattgtgtacaactatagctacttccttggcataaataccaaaaagtgggattttgagtcaaaatgagactgtggttaagtacctgcaacatcctgtagaccctgtgacgttagtacttggaatgagagcgggactcacggggcataactgctacctgtacattgtttacaatgcagcaagcaagggacaccgaatagcagctccggcagcctgtgctagcggcctgcagagaattccaggtgacgctccagaggggctaggagaggatacccttctgaggacagccatggctcgcccggcatcaccccactcaagaggccagacggggtcccagctggggtgacacagctcctttcccagtcgggaaggggcgtctgcagggaccaggaagggcttagcttggggctgcccgctccggcaccgacctgggacgcgccctgaggcccctgcctgggaccgtcccggactacatttcccagagaccatccaggagtacgccgtgctgcatgctggaacacggggcttggggctctggtttcccccgacggccccgcgtcctcttctagcctcaccctctcccgaggccccagcgttgggggactaccgggtgcgtctgcggctttgggagagtgggaggagggaaagggatgggaggggtgcacgcacacgtgtcagtgtgtccgcgtgtcagcatctgtgcaggcgcacgtgtgtgtcgggctctgttgtgtctgcacatgcgtgtcggcatctgtgcgtgcgcacacgcccgtcagggtctgtgtgcccgcacaggcacgtcaacagctgagcacgctatgtatcgggggtctgtgtacgctcacatacgtgtcggggtctgggtacgtgcacatacgtgtaggggtctgtgtgcacatgcgtgtcgggctctgctgctgtctgcgcgctgcggccgctgggtgcgcgtgcgcatgcgcgctggcctccagggggtggcgggaccgagtgtgtgacgcacttgcgtgggagtacgaggctgacgcggcggccctgtccccgtaactgtgacacgggtgcacgcgagcgtcattgggggcgatgggggccgtgctgggtgcgcgtttgcaccagtgacgcagccgctgcatctccgccagtccgcgcaggtgagattggtgcgcgtggctccgaggggagacgggcacggggcttctgacggtgacgcacttgctggagagtgtggggtgacacagccgggctctccccataactggtgaccgggggtgctccagaggctttgggtcaacgcagcccgtgcctgtgaacctcggcggtgcgtccctgggactctgctccgtgaggtgcgctctgggggttgtgcgggggcagcggtcgggacgggtctccgtggcccacggatgcacctctgcaccgtgtggggtggtggggcccgtagcatggccgtgctgggcgttagtgggtatgaggggcgcagatgtgtctcaggacagagtgagctgtggtgaggctgagctgtgcagacttgtgctgggatgggtgatcgggccttctgggtgacgcaggtgtgtgtgacaacacaacctgtagcttcagcgtctctgtgctgggatggatgatcgggccttctgagtgatgcaggtgtgtgtgacagtgcaacttgtagctccagcgtctctgctgcttcccctgccttcacctcctaaccaagcggtacctgcctgagaacaagggccgcggagggacgtgagcgcctgagcctcgcctggaaattcaccagcaagaaggcagaaacagccatgaggtgacgctttcagagccagaagtgctgtgcatgcaggccacctgagtgacaggggacggtggcctcaggagtagaattcctcctgtagagggacaggtccctgatgtgggagacagggaggggggcagctccacgcgtcatcatctcaatcgccacagcgtgctcttcaggaatctcccagaaactccatctcggggcctcgtatttctcattggttttattaggtatggcaggtgttacccttccggttctgttttccccaggccagcatccttcagaaaaagcatccccgaggaggaagacgaatcgttaaacatctgaaagggtcaggtgagtatccttttttttttatattaaatgatatgtgtttataagacttaagaccaaacattaaaggtagatgaccaagatttgagtcctgtttctgcctcttagctttttgagccttctgaagataggcttgtgaggagggtgaaatgcattaacacgcataaaacccatagacgcgcacccctgagtgggagtgcacagtgagtgctgctgttttgtgctaagtctggatgtctgtacatcaggagcaacgtacatatgaaggtaactgggatgggtgtttgcaggttcacaaaatgaaccacagcctcaaatggcctagaactgttatccttaacctgagggcctgcctttaactccacttacaactttccaagggacattctgtgtatatttactgtatgtgattatcagtgttagtgtatctgtcccccaccaccaccaccctaaggagatactctgtaatttcatggcattaagaaggatggacatgccccaaagacatttagacccattggtctacaatcgaaggctgtgtaccttgaccacaattattgttcaggatggtggaaatggttaagtaattataccacgttcatttcatggaatactctgcagctacaaagaagtaagtttagttataaccgtaagaaagaaaaatgcacctgacataatattaaacactactaatagttattaacaatagtaaatgaaggaaatgcttcagttgcctacaaattccattgaataagatttttgtaaataccttatccaacatgacattttagtatattatttaggattattcatgaatccttcaaaagagaggagcctggccacatttattgagcgcatttttgtaccatactctattgtgttttgcacacactccttaatttattcttaccttagtctgtaacaaagtaccatagaccggtggctgaaaccacaaacatttattgctcacagttctggaggctggaagtctgagaagagggtaccagcatggtcaggttctgatgagggcccttttccaggttggagactgtcaccatcttgctgtgtcctctcacggaggacatgtgtgtgcttggaggctctttggcagagctctaggaggtgtgtgtgcttggaggctctaggagatagtctttttttttctgtaattgagatggaggcttgctctgttgcccatgctggagcgcagtggcacaatcttggctcactgcaacctccacctcccagattcaagtgattctcccgcctcagcctcccgagtagctgggattacaggcacatgtcaccatccgcagctaatttttgtatttttagtggaaacagggtttctccttgttgatcaggctggtctcgaactcctgacctcaggtgattaattagccggcctcagcctcccaaagtgcgggattacaggtgtgagccaccgagcctgccctgtgggaggtattttatgtccttgcttttgctggcttctagacactgccccacatgccttggtttgtgaccccttcttccatcatcaaagctgcaaagacaggccaagtcccttttccatcacgtcactctgaccctacttctttctgttcatctcaccctcttctcattttgaggaccctggtgattacattaggcccgctgaggtaactcaggataatcttccctattttagtgtcagcccattagcaattttagtccgcctgcaaccttaattcccctttgccatgtaaggtaatatcatcataggtgccagcattaccatattgacatgtttgagagaggcaacgagagaacaataatcatatttcttttcttttttttttttttgagacagagtttcgctcttgttgcccaggctggagtgcaatggcgtgatctcagctcgccgtaacctctgcctcctgggttcaagcaattcctgcctcagtctcctgagtagcttggattacaggcatgcgccaccacacccagctaattttgtatttttagtagagacggggtttctcttttgttggtcaggctggtctcgagctcccgacctcaggtgctctgcctgcctcggcctcccaaagtgctgggattacaggcgtgagccaccgtgcccggcctatatttcttcttttatgtgtttttgttttgttttgttttgttttttccttatagacaaggttgtgttctgttgcccatgctggagtgcagtgggttgataatagttcacagcagcctcaatctcctgggctaaagtggtcttcccacctcggcctctcaagtacctgggattacaggcaccagccactgtaccctgctcctatcttgttatatttcttataataggattaatgcaggcctgctgggggcaaagaaagaaacagtccctaaggagcccttaaagaagaatctccaaattacccataattgtaccatccagagataatcactgatgaacattttaaatggccagcactttgggaggccaaagcgggatgatcacttgaggccaggagtctgagaccagcctgggcaacagtgagactccatctctactaaaataaaaaattgaaaaagattagccaggcatggtgatgcatacctatagtttcagctactcagaaggctgctgtgggaggatcacttgggcttaggggttccaggctgcagtgagccattgcactctagcctgggcaacaaagggagacagtgtctcaaaaaaaaaaacaagaaaaaaacatctgaaatggtatttatgtttctaggcctcttctttgcctctaagcatgtgtgtgttttgtttttggagtattgaatcttgctaattcatcataaatgagtcagagactccaaatcttaatttataaaaggaatccaacccagccatgagtcgcattacacctgtgtgtgtgttgggaggggaagggctatgccagtgatctttgccttgttttgaaatatctcacatatttctaccttgtaggattagaaatccatcatctgaatctaacctatggtaacaaattttcaagaaagacagccttttagaattagattatagaatgttaatgttcctttcccaggacatcacaataatcacccatgaacactaatcactgggtgccttgcagatacggactttccatgtgacattagcaagattatttgtacaagtaacaaatatgggctgtataagtaacatttccaagatagaaaaagaattagatgacagtatctcatatgtatctcccttatcccgtggaacacaaaattcagcctcttgctaatgttctcaacttggcatcttctcagattagagtcattaaattagattttcttatgcagaacaatgtctctgtccccctagttgctgatggaaagggaacatttcctcgttatatttcttagaatctcttttgctaatgtattcattttgttaaacaaaatgaatttcattcttaacatcagactctgaatgttatttttggttaatattgattacgcagacagcgggttcaaggaaggcacttttgtttttcttgagacagagtttcgctctggttgcctaggctggagtgcaatggcgcaatcgcggctcaccgcaacctctgcctcccgggttcaagcgattctcctgcttcagcctcttaagtagctgagattacaggcaagtgccaccacgcccagctaattttgtatttttagtagagacagggtttttccatgttggtcaggctggtcttgaactcccgacctcaggtgatccacctgcctcagcctccgaaagtgctgggattacaggcatgagccaccgcgcccagtggcacattttaccattagaaaaaaaaggagggggccaggcatggtggctcacacctgtaatccaaagcactttggcaggctgtgaggcaggaggatcgcttgagcccacaagttcaagaccaacctgggcaacatggtgagaccctgtctctattatgaatttttttatttttttgagacggagtctcgccctgtctcccaggctggagtgtaatggtgcaatcttggttcactgaacctccaccttccagttcaagcaatcctcctgcctcaacctcctgagtagctgggattacaagcgcgcaccaccatgcccagctagttttttgtatctttagtagagacggggtttcaccacgttggccaggctggtctcaaactcctgacctcgtgatccgatccgcctgccttggcctcccaaagtgctgggattacaggcatgagccaccacgcccagccttattatgaattttttaaaaataaaaactataaaaagaaaaactttttttaaagaaaaaaagcaaggagattggccgacatgagttggtcttcaataataacaggtaacttctattacacaaatgtcacatattattgagtgttttacatagattatcatacttgccagttgtaacaatcataccatgtagtacttttattacattttatcagtgacgaaacagacactatgaggctaactgccagggttcagattcacatctctaaagtcagaccacacaacctgtattcttaatttcatcaaaacatctctgcccaaattatatacacctttttaatctaccttcttcacttggtaattcatcataaaaattttctcaagccagacgcggtggctcatggctgtaatcccagcactttgggaggtcgaggtgggcagatcacaaggtcaggagatcgagaccgtcctggccaccatggtgaaatcccatctctactaaaaatacaaaaattggctgggcgtggtggcatgcacctgtagtcccagctactcgggaggctgaggcaggagaatcgcttgaacccgggaggcggaggttgcagtgagttgagatcacgccactgcactccagcttggccagagcaagactccgtctcaaaaaaaaaaaaaaattctcaataagaatcgatattattaggccgggtgtggtggctcatgcctgtaatcccagcactttgggaggccaaggtgggcggatcacgaggtcaggagatggagaccatcctggctaacacggtgaaaccccatctctactaaaaatacaaaaaattagccgggcgaggtagtgggcacctgtagtcccagctactcgggaggctgaggcaggagaatggcgtgaacccaggagacagagcttgcagtgagccgagatcacgccactgcactccagcctgggcgacagagcaagactccgtctcaaaaaaaaaaaaaaagaatcaatattgttagtattccatgccatcatatagcagaccataatttaacccatcctctactgtgagatactgctatttttttcgttgttgaaactgtattctctggaaatcatagataagatcaaggagggaatctgtgtcactatcctggctgtgatactgtactgcagttttgtttttcttttttttgagacggagtctttctctgtcacccaggctggagtgcagtggcacaatctcagctcactgcaacctccaccttctgggttcaagcaattctcctgcctcagcctcctgagtagcggggattacaggctcccaccaccatagccagctaatttttgtatttttagtagagacggggtttcaccatgttggccaggctggtgtcgaatttgtgatctgcctgccttggcctccaaaagtgctgggattacaggcatgagccaccatgcccggcctgtactgtagttttataaggtatcactactggtgtaagtcaggttaagggtgcactggatctctctgtattattatttacaactacatgtgaatctacagttatctcagttttttagaaaaataacttacctagaaaaaaatttttcttgatcgctctttcacatacatttatgtacttctgttttcttgtctttctaactgtttcctcctcctggacccataaattccacatgtggaattttgagtcaaaattagatgtttgttaagggcccgcactatgccacaccctgtgacgttagtacttggaatgagagcgtgactaacggggcataactgctgcctgcacattgtttacaatccagcaagcaaggggcaccgaacagcagctcgggcagcctgtgctgtggcctgcagagaattccaggtgacgccccagagggcctaggagaggatacccttctgagaacagccgtggctcgcccggcatcaccccactcaagaggccagacggggtcccagctggggtgacacagcgccagtcacatccactcatggacactcagtaggccacactcccgatcacccagccacagtcctagatcagtcactgactcacagtctgccacttgtatttccattgtctctgggcttcctctgccttcaccttccaacagtgtggtacctgcctgagagcagcggcccccagtgggacatgagagccaggaccctgtcattaactgaaccaacacaaagggcacagccattgtcatagataagtgttcaagccggacgtgttctccgtaccggctcctgtgtcacagtaacgggaagcctcaggagtgggagtccttgtggagggagaggtgactaacttggtaggtgagtgtcgggagcatcacgtgttctagaatccagtaaatacacgttagtccccaagaactctgaaactcacaaatgccagtgtcctctccattcggattggtttcggctgtggcctggggacaggcgtgccctggagggtatttgctaatgcagcctgtgctccagaaagaccctaggttctcattcttcctttcccctaggctggcatccttcagaaaaagcatcctgagggggaaaaaaaaaaaaaaaaaaaaattattatttaggttggtgcaaaagtaattgcggtttttgccattatgtctaatgtcaattgcttttgcactgacctaatattatatatctgaaagtcggctctccacatgagttaccttttttgttcattaaatgatttgtgtttatatgacttaggactctttactctttatggccccaaatatcctccctaatagcaatttatcccagtaattcctccccaggggatgtggcaagggccaggcaggtatattcctctctgtaccccctggttgaccagccctctcctttgagtatccacaaacccatttgtcaaattgttgacatcctgctgtgtgctctggttttctaagatctgatggtatagaaaaatcccccctaaaaaaaaaaaaaacaactccctcctagaggttcatgttagcgcgctttattttacagtgtgcttgggtaaggaggggattcgtttttaggtggagtcaaacacagatatctttggtcttttccatgggactgatttttagagcacaagaaaagagaaagttagtttgtttagtctgtacctggcaaagttgtcagttttgtgaggcctttaagagcggagtttgagctaatttctgtgtcatcaaaggcagagatgtttttcaatatgcagtaaatcgaaatttgttctattcacttggacttctttgggcggacagcttctgtttttcttcagttccccgtttgtgtgaactgtgagaaaccatatggtttaatgttgagtatgagttctggatctagggcagaggttggcagctgtcttcaatggcaatttgtgtatgtttatggtctacagaggctttgatctgtgtttatactgcagattaaatcaagctgattaacatatccctccctcaactcactgataatcatatttgcaatgagaacatttaaatctagtctcttggcatattcaatattattcattatatttagtcaccatgctagacaataaatctccagaaattattcccactttatctcctttaatcttctcattccccatcaccctcccaggccctgacgaccacctctcttcttctgtgagttggattttttttacactccacatgtaatgacatcatgcaggatttgtctgtctagcttatttcacttagtacaatgtcctccagatttacccatgttgtcacaataacaggatttccttctttataaaggctggatggcattgcattgtgttatctctaccacactttctttattaattcctgatgagtatgtaggttgattccttatcttggctactgtgaataatgctactgcagtgaacacgggagcacaggtatcgccatgacatactaatttcattttctttggatatatacccagagtgggattgctgcgtcatctgatagttttagttttttcaggcatctccacggtgttttccatcatggctaatttacattctaaccaacagtgtataagggtcctcttttcctcacagccttgccaacatgttattttttttgtttgttttttaataaaagccattcttacatgtatgaggtgatatctcattgtggtttaactttttgttgccctgaataatagtagtgatcctgagcaatttttcacagacctatagcaatttgtatgtgttctatcaagaaatggctgttcaagttttctgcccatttattatcagggttgtttggttttttgctgttaagttgtttgagttctatgttttgtcatttttgtttgtttttttttgtttgttttctagacagggtcttgctctgtcatccaggctggagtgcagtggtgcaatgacagttcactgcatcctccacctcctggacccaagcaatcctcctacctcagcctcccaagtagctgggactacaggcacatgccatcatgcccggctaatttttcttttcttttcttttctttttttttgagatggagtctccctctgtcacccaggctggagtgcagtggcgtgatctcggctcactgcaacctccgcctcccgggttcaagcgattctcctgcctcagcctccgagtagctgggattacaggcgcgtgccaccacgcccggctaattttttttttgtatttttagtagagacagggtttcaccctgttagccaggatggtctcgatctcctgacctcatgatccacttgcctcagcctcccaaagtgctgggattacaggtgtgagccacggtgcccggccaatgcccgactaatttttcaattttttgtagatatggggtctcaccatgttgcccaggctgatcttaaactcctgggctcaagcagtcctcccatctcggccttccaaagttctgggattacaggtgtgagccaccatgccaagccctattttggatattaaccccttatcagatatatggtttgaaatagtctctcccaatccataggctaccttttcattttgtttcctttgctgtgtgggagatttttagtttgatgtagtcccatttgcttatttttgcttttgtaggatgatctggtgtgatagctaaaaactcattgccaagggcgatgtgaaggagaattttccctatgtattctcccagtagttttacagtttctggtcttactttttatgtctttaatccattttgacttcatttttctttttttctttttcttctttttttttttgagaccaagtctcactctgtcacccaggctggagtgcagtggcacgatctcggctcactgcaacctccacctcccaggttcaagtgatttctcctccctcagcctcctcagtagctgagattacaggctcctgccaccacacctggctaatttttgtatttttagtagagacggagtttccccatgttggccaggcaggtcttaaactcctgacctcaggtgagccaccgcacctggcctcatttttctctatgaagtaaaataagggtccagttgcattcttctgcatgcaaatatccagttttcccaacagcatttatttaagagatcgtcctttccccattgtgtgatgttggcacctttgtcaaagatcagttgaccatgagtttggatttgtttctgagctctgttcttccattgtgtgtgttttcatgccagtattataaccgtaataggtccgttgccccatgagcacagcatgtcaatacagcaggttgcagcaaagaaagacggtttactgtaaggctgcagaacaaggaggtaggatgaaaatgaaatccgtcctcccagggagtttggagctagggtttttaagggttttaaagtgtggaaatcactgcttaaagagtgcagtgtggagtcatgagacaggaagatgaagaaactattctcatgctgattctgttcctctgtggttgtcttcagactgcttggcatcagctatttcactggaatttgggacctgagaaacatcttgtgcaattcttaaaagcctcatgattctaacgttagaaatcctatgtatgggaacagtggggactctgtctcaaaaaaaaaaaaaaaatttttttttaaaaatcttttcatattgttttccagtctgtattttatttattttttgctctaatctttattatttccttccttcctatctttagactccatttgttcattttctggttccttgaaatgtttgtttgagatcttccttctttcgtgatataagtatttactgctataaacttccggcttagaactgcctctcttgccttctttaagatttgaggatgttgtgtttacatttacgtttgtctcaaaatatttttacagtttcttccctggcccattggttgtttagcatcatgtcgattaatatccacatattttttgatttacctaaatttctcccgttattgatttccagttttatgcccttgtggttggaaaaggtcattcatatgatgtcagtcattgtaaatttcttaagatttgtatcatgtcctaacatgatctatcctggagaatgtttcctgtgtacttgagaagaatgtacatgctgccgctattagagagatggtgcagaatacaactgttaggtccatttggtctaaagcgtaattcaggtccaatgtttacttgttgattttctgtccgaatgatctttcctttgttgaaagtaggatttgaagtcctcttctgtcattgtattaaaatctaaccctcccttgagatttcttaatgtttgctttatgtatttaagagctccaatgctggatgcatacatatctataattaatatatcatcttgactgatggactaattttattatataatgacattctttgcctctctttacagtttttgatttaaagtctattttgtctttttttttttttttttttttttttgagttagagtctcgctgtatcacccatgctggaatgcattggcccgatcttggctcactgcaacttccgcctcccaagttcaagcgattctcctgcctcagcctcccgagtacctgggattacaggctcctgccaccacgccaggctaatttttgtgtttttagtagagatggggttttgccatgttggccatactggtctcaaactcctgacctcaagtgacctgcccaccttggcctcccaaagtgctaagattacaggcgtgagccaccatgcctggccgttaatctttttttttttttttctttttttttgagacagagtcttgctctgtcacccagtctggagtgcaaggtgcaatctcggcccaacctccgcctcccgggttcaagctcttctcctacctcagcctcctgagtagtgtgcaccactatgcctagctaattattgtattttttagtagagatggggtttcaccatgttggtcaggctggtgtcgaactcctgacttcgtgatccacccaccttggcctcccaaagtgctgggattacaggcttgagccactgcgcctggccaatcattttttaaaattaggactcccttaactttcactccttataacgggattaatgcaggccaactgcaaaaaaattcagtcctctaaggagttcataaagaagaatctcaaaattaattacccataattccatctagagataattactgttaatcatatttggtatatatgtttatagtcctccacttcccctctaaacatgtatgtgcttttgtttctggaacattaaatccttctaattgataaagtaaatgaatcaaagactttccaaatggtagtttgtgaaaggcatccagcccagccacgggtcacgttatacctgtgagcatgtggggatgggaggggtgtgccagtgatctttgtcttgttttggaaaacctctcatatatttacaccttataggagtagagacacatcatctgaaactaatcccatggcaacaaattatcaaaaaatatagtgcacccttggaatgagttctgcatctgtggattcagccacagatcaaaaatatccttgggaaaaaaaataggaggtttgcatcctattttacagatgctaacatctgtattgaacatgtacagacttttcttctcattattctaaaccatacagtatgaaaattattagcatagcatataagataatttataaagaatctagaatctaaaatgtacaggaggatgtggataggttatatgcagatactataccactttgtataagagtctgaagcattcgaggattttgatattcaggggggttctggaacaaatctggatactgagggatggctctacagcctttcagaattaaattttctatgattttaatggttctttcaaagaccatgacagtaatcactgacgcctgttgccttacaaatctgcttgtacaagtaacatttccatgattatatgtacaagtaaaaaatacccactatacaaataacaaatccaagatcagtgaaattgagtacgatgacaattaaaatggtttgcataaatgtcctataacacatggaacacatgattcatcctcttgctaatgttcccagtttggcatcttctaagatcatattatttgagcacaatttttgatgcagaatcatctctctgttcccctactcgcttgtgagagggaacatttcctccttatgtgtcttagaatatttttacctaacatgcttaaacaaaacaaatttcattcttaacatcaggctctgaaagttccttttagttagcatttgctatattgacagctggtttgacaagtacatattttagcataagaaaaaaacagcaggccgggtgcagtggcccttgcttgtaatcccagcactttgggaggccaaggaggcagattgcttgagctcaggagatcaaggccagcctgggcagcatagcaagaccccgtctctaccaaaaaaaaaagaaaaaaaattacaaaaactagccagatgtggtggcgtgcacctgtagtcccagctcttgggaggctaaggtgggaggatgacttgagcctaggaggcagaggttgcagtgtggttgagattgcactactgctctccagcctgggtgacaaagcgagaccctgtttcaaaaaaattaaaaacagcagatgagtttcttttttaaaactggattcaggatcagtgtaatgttactgatcttcaatagtaaccacaaacttaaaaaatctttacatattgccgtatgtattagatattctgatatttaatagctgagacagtcataccttatagtattattatcccaattttactagtgaggaaacaagcagttaataactgttagagctcagattcacattctgaaagttatagaaattaagaacatagagcctatgttcttaatttcaccaaaatatctcctcccaaattatacataccctttcaaacctaccttcctctcttagtaattaatgataccgtctttcaatttacatgaatcagtatcactattagtaaatgtattttatgccattatataacagactaatttatttattctgtactctactgtgatattttcctctatcttctgcaagattttcatttttaaaaattactgtcttggctgggtgcagtggctcatgcctgtaatcctggcctaggcaacaagagtgaaactccatctcaaaaaaaaaaaaaaaaaattagtgtcttgaaatttgcataacatcaatggatgatgtcattgtgaatgtcctggcggtgatattatactgtatactataatcaccaattggtgtaaccaggtgaaagatacataggctttctcagtattatgtgtacaactacctaagaatctacggttgtatcaatttaaaagaaaaactttcccacacaagataatctccaaacatcttgggcatacatgtgtgtactactctagctatttccttgggataaattctaaaaagtgggattttgagtcaaaatgagactgtggttaagtagtacctgcaacatcctgtagaccctgtgacattagtacttggaatgagagcgggactaactgggcataactgctgcctgtacattgtttacaatccagcaagcaagggacaccgaatagcacctcgggcagcctgtgctggcggcctgcagagaattccaggtgatgctccagaggggctaggagaggatacccttctgatgacagccatggctcacccggcatcaccccactcagaggccagacgggctcccagctggggtgacacagcccctctcccagccgggaacgggcgtctgcagggagcaagatggactcagtgtggggctgcctgcctggaacgcgccctgaggcccctgcctgggaccggcccagactacgtttcccagaggccccccaggaacttaaggcgctgcatgctgggacacggggcttggggctctggtttccccagacatcgccctcctcaagcctctcaccccttcccgaagcccctgtgtgtttgggcctgagtagggcattcgcttcctaggaggaacccaggggtgcgcgccaagcatgggggtagggggaccgccgagtgcgcctgtggcttcgggagaggccaaagaaggaaggagtgggaagggcgcgcacgcgtgtcagtgtgtgcatgtgtcagcgtctgtgcacgcgcacatgtgtgtcggggtctggtcgcacatgcggatcaaggtctggccacacgcatgcgttgggggtctgtgtgcgcgtacacgtgcatgtcgcggtctgggtgtacatgcgtgtcaggatctgtgtgcacgcacatgcgtgtcgggctctgctgctgcctgcgcgctccggccgctgggtgcgggaggcccctcccgagtccggggtgcgcatgcgcgctggcctccatgggtggcgggaccgactgtgtgacgcacttgcgtgggagtgcgaggctgacgcggcggctctatctcccgtaactgtgacacgggtgcacgcaagcgtcattgggggtgatgggggccgtgctcggtgcgcttctgcaccggtgacgcaaccgctgtgtctccgccagtccgcgcaggtgagattggcgcccatggctccaaggggagacgggcacggagcttctagcggtgacgcacttgctggagagggtgtggggtgacgcagccgggctctccccataactagggctggggtgctcccgaggctttggggcgacggaacccgcacctgtgaacctcggcagtgcgtccccgggactctgttctgtgaggtgcgctctgggggatatgtgggggcggcgatcaggacgggtctccgtggcccacggatgtgcctttgcactgtgtggagtggcggggccggcagcgtggccgtgctgggcgttagtgggtatgaggggcgcagatgtgtctcaggccagtgtgtgctgtggtgaggctgagccatcagtgcaggcttgtgctgggatggttggtcgggccttctgggtgacgcaggtgtgtgtgacagcacaacctgtagctccagcgtctctgtgctgagatgggtgatcgggccttctgggtgacgcaggtgtgtgtgacaacacaacctgtagctccagcttctgtgtgctgggatgggtgatcgggccttctgggtgacgcaggtgtgtgtgacagcacaacctgtagttccagcgtctctgtgctgagatgggtgatcgggccttctgggtgacgcaggtgtgtgtgacaacacaacctgtagctccagcttctctgtgctgggatggatgatcgggccttctgggtgacgcaggtgtgtgtgacagcacaacctgtagctccagcgtctctgctgcttcccctgccttcacctcctaaccaagcggtacctgcctgagaacaagggccgcggaaggacgggagtgcctgagccctgccaggaaattcaccaacaagaaggcagaaacagccatgaggtgacgctttcagagctagaagtgctctccactcagggcgcctgagtgacaggagacggtggcctcaggagtagaattcctcctgtagagggacacgtccctgatgtgggagacagggagaggggcagctccacgcttcatcatctcagttaccacagcgtgctcttcaggaatctcccagaaactccatctcggggcctcgtatttctcattggttttattaggtatggcaggtgttacccttctggttctgttttccccaggccagcatccttcagaaaaagcatccccgaggaggaagacgaatcgttaaacatcttaggtcaggtgagtatcttttttttttttttaattaaatcatatgtgtttatgagacttagtcggcgggcgcagtggctcacgcctgtaatcccagcactttgggaggccgaggtgggcaaatcacaaggtctggagatcgagaccatcctggctaacacggtgaaaccccgtctctactaaaaatacaaaaattagccgggagtggtggtgggcgcctgtagtcccagctactcgggaggctgaggcaggagaatggcgggaacccgggaggcggagcttgcagtgagccgagatcgcaccgcttcactccagcctgggcaacacagcgagactccatctcaaaaaaaaaaaaaaaaaaaaggaaatcctattgaattagacgttttgtaaatatcctatccaagatgacgactgattattcagtgaaggaagagaggagcctggtcacatttattaagcacatattctctgtactaaactgtctcttgtctattttgcacacacctcttaattcttgtcttagttgattcagtctgtgataacaaagtaccatagactgtgtgactaaaagggcaaactttttttttttaattttttttttttttagagacagggtctcactatgttacccaggctggtcttgatctcatgagctcaagctttcctcccaccttggcctcaaaaagtgcttggattacagatgtgagccaccatgttgggccttttttattgtttttgttttgttttgtttttgagacagggtcttactctgtcatcaaggctggagtgcggtggtgtgatcatagctcactgcaacctcagccccctgggctcaagcaatcttcccaccccagcctcccaagtagctggggctactggtgtgtgccaccacatgtggctgtatatttttatttttattttgagacggggtctcgctttgtcatccaggttggagtgcagtggcacaatcttggctcacttcaacctctgctttctgggctcaagcaatcctcccacctcagccttctgagtagctgggactacaggtgtgagccaccacacctggctcttttttttttttttttttttttttttttggtagatacaatgtttcaccatgttgcccaggctggtcgtgaactcctgagctcaagcaatctgctgcctgcctcggcctcccaaagtgctgggattacaggcgtgaggcgccacacccagccaattttttaatattttatagagacagggtcttgccatgttgcccaggctggtatcaaactcctgagctcaagcaatcctcccatttccacctcccaaagtgctggggttacaggcatcacccaccgtgtccggccacagcaagcatttatttcttacagttctgggggctggaagcctgagaccagggtgccagtgcaagcagcttccggtgaggccttcttcaaggttgcaggcgaccaccctcgtgccatggccacacatggtgaaagggagctgagagctctctgggatcgtttttataagacactaatcctattcctgagcactcctccctcatgtcctaatcaccttccaaaggcctcacgtcttaataccatcacattggggaacagaatttcaatataggaatctggggaggaataaaatacttagttttgtcaggtatcttcagaggctatttaggtacagtattgtgctcagggtcagtgtgtacaaaaccaactcatttttcttctctcacaccacaacgataatcaacacagaaaactttgtgacttggccgggtgcggtggcccacacttgtaatcccaggactttaggaggccgaggcggatagatcactttgaggccaggagtttgaaaccagcctggccagcatggcgtaaccctgtctctactaaaaatacaaaaattagctgggtgtggtggcgcatgcctgtaatcccagctactcaggaggctgaggcaggagaatcgcttgaacctgggaggctgtgaacctgtgatgagctgagatcacgccaccacactccagcctaggtgacagagcgagactctgtctcagaaaaaaataagctttgtgactaaatgtgtggggagaagcaagctgtagtggacatcagccggatgtcctgcagttcagttctgacaccatctacctggagatggcatcagattccacaggttgtgagcaagactgtcccactctgccccactagccacaagaccaggcctctgggacatcttgccaaccctctacaggttggggttcttatactctttggcttctattagtgtatttgattgactcagaattcagggaaacacatataccagtttattacaaaggatattttaaaggatactaatgaacagccagatgaagagatatgtaggactagggttggaagagtcccaagcacaggagcttctgttcccgtggaattggggtgcgccaccttttcagagttcttttgtaccttcctagcagccacctcctgttcagctgtccagaagctctcctcaccctgtcttcttaggccttttatggagacttcattggataggtgtgactgaagcatgcacgaatgtgttgaaacgtgattggacaaataagagttgatttaatgctaattgattgagtggggaaactcaaggcccgtctgttcagattcttcttggcctctcagtgcagcattccttcctacaggtacagggcaggaccctctctggagtgagagtcctgctttgggcaggtgaaaggagggcaagagaagatgagagagagattctgcttcccgaggcctgcttctgaggctgaaagtgccctaatattaagattttaccaagggttatggaattatgagccaggaaccatggacaagaacatacagacacactcataccccatatatacacacatataggcacctacatatatacacaccatacacacatatacacacacataccccatatatacacacatatacacacctatacacacctacatatatacacacacatacacaccatacacacatatacacataccatatacacaccatacacacatatacacacacataccccatatatacacacatatacatacctacatatagagacacatatatacacaccatacatatacaaacacaccccgtatacacacatatacacacctacatatagagacacatatatacacaccatacatacacacacaccccatgtacacacacatatacacacctacatatatacacaccatacatatacaaacacaccccatgtacacacctacatatagagacacatatatacacaccatacatacacacaccccatgtacacacacatatacacaactacatatatacataccatacgtatacaaacacaccccatgtacacacctacatatagagacacacacatatacacaccatacacacatatacacacacaccccatatatacacatacacacctacatatatacacacatacacatcgtacacacacaccatatatacatatatacacacatatatacacaccatacacacatgcacacaccatatatatgcatatatacacacctacatatatacacacatatacacacacgccatatatacacacatatacacacctacatatatacacacatatatacacattcatacatgtacatacacaccccatatatacacacatatacacacacatcccatatatacacagctacatatatacacacatataaaaaccatacacacatatacacaccccatatatacacagatatacacacctacatatatacacatatacaccatacgcacatgcacacacatacccatatatacatatatatatacacacacgtatatacatatatacacaccataacacacgtatatacatatatacatatacacatatacataccatacacacacgagcatatacacacacatgccatacacacacatatgtacacatacatacccacaccatacacacatacatacacaccacacacacacatatacaccccgtacacatatatacacacaccatatatacacacacatatacgcacacacaccccatacacatgcatacctcatatatacatatacacacctacatatacataccatacacacacatatatacacacatatacccacaccatacacacacatatatacacacaccatatatatacacacatatatacacatccacaccatatatacacacaccatacacacacatatatacacacaccatatatatacacacatatatacacatccacaccatatatacacacaccatgcacccacatatatacacacaccatatatatgcacatatatatatacacccacaccatatacacacacatacacatatataaacaccatatatatacagacacatatacacacccacagatagacacacatatacacaaacatacacacaattatatcacaaggtctgattgtattactgagacacagtgaaaggatgttccataacaggaaggttatgcctgattcagtgacactactttttcaatattaggccttatatcagtttatttttgctgttttaacaaattactgtagattattggcgtcatacaacacaaatgtattatcttactgtcatagaggtcagaagtctgaagtgggtctcaccgggctaaaaccaggttgttggaggctgtaggagatattctgtgtccttgcttttgctggcttctagacgccgcccacactccttagttcgtgaccccttcttccatcagcaaagcctgaaaagacaagtcctttttccgtcacaccactctgaccctcctcctctaagtttaaggactctggtcattacattgcgcttgcttctataactcaagagaatcttccgtatgttagaggcagccgattagccattttaagtccatctgcagccttaattttcctttgccatacaaggtaacatatttgaaagtactggaattaccatagagacacatttgagaggtgggcaaagtggcaagatcccacctctacaaaaatacaaaagttagccaggcgtggtaatgtgcaactgtggtcccagctactagggacgctgaggtgggaggatcacttgaacccaggagatcgaagctgcagtaagctgggttcacaccactgtactccagtggcgacagagtgagaccctgtcgcaaaatatatgtgcacacatacacacatttgagaggcaggcctatccattcagagtttccttaatgactacagtgtgcctgctcccccataactatgtttgtgtttggcattttcttttaatttgggactatctcagtaaatttcttatattataatgggattaatgcaggcctgctggccaaaaaaaaaaaaaaaaaacaaattagtccctgaggagctcttagagaaaactctctaaattacccgtaattgtgcgatccacaggtcattactgtttctggtcctcgtttttgtaattaatgtttctagtcctcctctttgcccttaagcaggtatgtgttttctttctggagctggaattttgctaattaatcatgtgactactccagagactctttaaatctagttttaaatctaatctgtagcagcaaattatcaagaaagcctttaaaattaaagattctaaggtggaatgattgcttgaggccaggagtttgagaccaacctgagcaacatagtgagacctcatctctccaaaaatttaaaaaattagccaggcatggtggtgtgtgcctatggtcctagctacttaggaagctgaagtgggaggatcccttcagcccaagaggttaaggctgcaatgagccgtgatcccaccactgccctccagcctgggtgaaagagtgagaccatctcaaaaaaaaactagaaggccgggtgcaatggcttgtgcctgtcatcccagctctttgggaggctgaggcaggtagatcacctgaggtcaggagttcgaaaccagcctggccaacatggtgaaacgccgtctctacaaaaaatacaaaaattaggcaggcgtggtggcgcgcgcctgtaatcccaggtacttgggaggctgaggcaggagaattgcttgaacctgggaggtggaggttgcagtgagccgagattgtgccacagcattccagcctggatggtagaacaagactctgtctcaaaaaataagataaaatagctagagattctagaattgtaatgtttctttcccagaacatgacagtaatcactgataaattctaagtaatcatcaggtgccttacaaatatggactttctgggtaacattagcaaggttatagatacaagtaacaaagactgtgtaagtaacatttgcaagataaaataatgaggtgataagatggcaatagttaaaaatgttcacatgtatcttccatttcacatagaacacaagattcacgccgggtgcagtggcttatgcctgtcaccccagcactttgggaggccaaagcgggtggatcacctgaggtcaggagttcgagaccagcctggctaacatggtgaaaccccatctctactaaaaatacaaaaactagccaagcatggtggcaagcgcctataatcccagcttcttgggaggctgaggtaggagaatcacttgaacctgggaggttgaggttgcagtgagccaagatcgctccactgtactccagcctgggcaacaagagcaaaatcccatctcaaaaagaaaaaaaaaaactccgggcactgtggctcatgcctgtaatcccaacactttggaaggccgaggtgggcagatcacgaagtcaggagttcgagaccatactggccaacatggtgaaaccccatctctactaaaaatacaaaaaatagccgggcatggtgacgcatgcctgtaatcccagctactcaggagactgaggcaggagaatcgcttgaactcgggaggcagaggttgcagtgagtcgagattgcgccactgcactccagcctcagcaacagagtgagactgtctcttaaaaaaacaaaaaacaaaaaaccagattcaccctcttgctaatgtttgcaagttggcatcttctcgaaataggttctgtaagctggctggattccacacccccccaccccccgtccccgagaaggagtcttgctatgtcatccaggctggagtgcaagggcgtgatctcagctcactgcaatctccgcctcccgggttcaagcgattctcctgcctcagcctcccaagaagctggtattacaggcttgtaccaccacactcagctaatttttgtatttttagtagagatggggtttcaccatgttgggcaggctggtcttgaactcctgacctcgtaatccacccacctcagcctcccaaagtactgggattacaggtgtgagccaccgcacccagccaagctggattttttaatgcagaatcatgtctcttttctctacttactggtggagaggcaacatttccctaaatgtgtcttagaatctttattgctagttttgctaatgaacagaatttcattcttcacacattaagctctgaaaattgtttttagtttgcattcattatattggcaactggcttgagaaatatattttaatgtaagtaaaaaaaaaagcagacttgattattttataaaatttgagatgtgtaatgttgatcttcaataataacagctaatttacattaaataattgttgtgtattactgcatgttgtagatagattatcttagttaatagttcatgcagtcataccttgtggtatttttattccagctttaccagtgaggaaaccgacactgtgaggttagtaatcatcagagctcaggtttgcatcctgaaagaccacagagctgccaggtgcggtggcaaaacccatctctactaaaaatacaaaaattagccgggcgtgggcgcgcacctgtagtcccagctactcaggaggctgaggcaggagaatggcttgaacccgggagggagaggttgcagtgacccgagatcacaccgttgcactccagcctggcgacagagcgagacttcatctcaaaaaaaaaaaaaaaaaaaaaaaagagcacagagcctgcattctttttttttttttttttttttgagacagagtctcactctgttgcccaggctgcaatacagtggctattcacaggtaccatcccactactgatcagcacaggagttttgactgcctctatttctgacctgggccagttcatccaagcctgtgtccttaatttcagcaaaacatctctgtccagattatacgtacctttttattttattttattttattttttttgagatggagtcttcccctgttgccaagactggagtacagtagtgcgatctcggctcactgcagcctctgcctcccgggtcccagcgattctcccgcctcagcctcccaagaagctgggattacaggcatgtgccaccatgcccggctaatttttgtgtttttagtagagacagggttttgctatgttggccaggctggttttggaactcctgacctcaagtgatccacccgccttggcctcccaaagcgctgggattacaggcatgagccactgtgcccggactatacataattttttaaatctaccttcttcccttggtaattcatcagaaattttttctcaattaatctgcatcaatatcattagtaaatgtattccatatcattatataacattatttatatatgtgttctctactatgagatatttcagttgttttcatttttaaacattatctgctggaaaatctggataagatccatgggttgttattgtcctggttgtgatattttactgttattttgcaaggtgtcacagttggcataaatcaggtcaagggtacaaaagaccactgtctagtatttcttataactacatgtgtatctacatttatctcagtttaaaagacaatctttcctagaaaaaactgattttttgaacattcttaggcatgcattcatatactactatagctatttccttgtcataaattccagaatgtggaatttttagtcaaaattagacatttgttcagtgcctgcaatatgccagatgctgtggctattcgtacttggaatgagagtctgattcagtggactcagctgctgcctgtacagtgtttataatccagcaagggaaactaaatagaagaagctcaaggcagcctgtggtcaaggccggtggagaattccaggtcacacactcagagaggtgccaggaaggggacatcattctgtggacagccactgataattcatgaccaggtgattctgaatatactgactctttgttgggataaatggaatttattttctaggctttataccttaggtaatttttttcctttttaaattttttgtagagatggggtcttgctatgttgcccaggctggtctcagactcctggcttcaagcagtcctcccactgtggccccacaaagcgcagtgttggcattacaagtgtgaaccactatgtctggccttttttgtcctttatccttttttatttttatttttttttctttttgagacagagtctcagtctgtcacccaggctggagtgcagtggcacgatctgggctcactggaaactccacctcctgggttcaagcaattcttgtgcctcagcttcccgagtagctgggattacaggcacgcaccaccacacctagctaatatttgtatttttctagtagggacggggtttcaccatgttggccaggctggtctcaaactcctgacctcaggtgatccgcccgcctcagcctcccaaagtgctgggattacaggagtgagccaccatggctaggagtagactttttaagaaaaaaaaagaaaccttctttgtctttggagagtctaattgcctctgactacatttcaaatcagtacacatttatatttgataagggaatgcatgccttttgttgcaacaaataggtgcactgaaatgaagacactcaagatcacggggtgtgtcaggagctgtcaggaccaccaccaggttccttgtttctctagatggactcaacaggactcaccatctagacctactcgtgaccgatttattccagtgaagggatacaaagcaaaaccagctgagggagaggttgcataggacaggttagcagggcaccaggctccctcttcctcagtcctctcccaggggcatcacaccggatgtgcctggctcatccagcatcacattgtgacaacacctgttccatgttatcgaccagggaagctcaccagagtctgctggtgcaaggtttggtttggtttggtttggttttgggtcagagttttgctctttcgtccaggctggagtgaagtggcatgatctcggctcgctgcaacctctgccccctgggtgcaagtgattctcctgcctcagcctcccaagtagctgggtttacaggcacccgccaccaggcccagctaatttttgtatggtagtgcaaggttttgatcagggttcatgcacacactgcctcgcacaatctgaatcttctggactcccggaggaaaccaagggttccgtgtaaaccacattgtttatactgattattccagcgaagggatacaaagcaaaatcagaagagggagaggttgcataggacaggttagcagggaaccaggctcagtttaggcacagcgagccactcttacacgtgaaagaagagtgagaacactcgggtgtggttttcagacgccatgggccagtgttgcgagcagcctaagcatggcagtttccagttcagtgtgttaactgttttgcataaggggtcgtagaacttcccggattttttctttctgtttctctgtttttatatctctattttatttatttttctactgatatcttagggttggtttgtcagcgtgtatggttctgcattccctccttccctctctcctcctctccctctctctccatatatatacatgtgtatgtgtatgtgtatatatagacagatgcgtgtgtgtgtgtatttttatatatggaattttacaaatgttattgtgtcattctgttttggtaacctaactttactgagagtatgtctgaaatatctctcatgtctttaaatatctttctaacttaacattcagtaatcatttactattttactttgatattctgtgtgtaattatgctgtcagcttttctggactcaaaagtgctctcagatgtcacctctggtatacaaaaaaaacagttctgtatattacctgagcagtttcttgtccacctgccatgttgtgagtaacatcacccaatctagaggccagaagaggcccaagtttggataatacagcccctgttcaccctggaagcttgtctggaggggccagggtaggctcagaatgagactgaatactctgagcacccactgtctgatcctagatcacaatccccccatccagagttagctaatctatgaggctcatgggtatggtctgcatagaagaccaccctcacttctgacaccactgcaagcttggtggggattcctcaaaccgccctcaggttcaacagttcactagagccaggcatggtgactcatgcctataatcccagcaccttgggaagctaaggtgggaagctcacttgaggccaggagttcaagaccagcctgggaaatatagtgagacgcaatctctacaaaaaaaaaaattagccaagtgcagtggtgcaacctgtaatcccacctactcgggaggctgaggtgggaggattgctcgagcccaggaagtcaaggctgcagtgagctgagattgtaccactgcactccagcctggatgagagtgagaccctgtcttaaaaaaaaaaaacaaaaaactattcactaaaaggacccacagaattcactgagagatgttatgctcatggttacagtttattacaaggaaaggatacagattgtcatcacccaaggaaagaagtacgtggccaggtgtggtggctcatgcctgtaatcccaacgctttgggaggacaaggagggcagatcacgaggtcgggagtttgagaccagcctggccaacatggtgaaaccccatctctactaaaaatacaaaaattagctggacatggtggcatgtgcctatagtcccagctactcaggaggctgaggagaatcgcttgaacccgggaggcagaggttgtggtaggccgagatcgtgccactgcactccagcctgggcaacagagtgagactccgttcaaaaaaaaaaaaaaaaagtacgtaagttgaagtccaggagggttccagacacagagcttctggtgtcttctccctgtggagtcaggactcattactctgctgtctttgatgtgtgacaacaggcaccaactatcgccaactagagaagctcaccagagctctgatgttggaagtttttattggggcctcagcatgtagacatgattgactggttggtggattaactgtctacatggttaatcttagtgtccaggtcagctgatactgcgtgaccaaaagctcctaccccgaatcccttgattagtatttctggcatagcaagcccccatcagaaacaaagacattcctcttagaggtaatatagattacctttcagcaccagagggcaaaggccagactactttttaggcaagtacacattctttactacatcccacccatccgtccccgacagggagctggccagaaatggagccctcctgttaaattgtctgggcctgtctttgaggcgcaaaaaaaaaaaaaagtaaagcctcctctgctgtgtgcagctaggtttcctgaggtttcattgagagcttggtttaggtttgatccatgatactcttttttttttttttttttttttttgagacagaatcttgctctgtcaccagaggctggagtgcagtgacgcaatctcagctcactgcaacctccgcctcccgggttcaagcgattcccctgcctcaacctcccaagtagctgggactacaggcacgtgccaccacatccggctaattttttgtatttttagtagaggcagggtttcaccgtgttagccaagatggtctcgatctcctaaccttgtgatccacccacctcggcctcccaaagtgctgggattacaggcgtgagccaccgcacctggcctgatccatgatactcttcacctttcccagatatgtcacggttatgtgtttgtgttgggaagccaagacagaggagccaaaaggtcatattacatcactatggggaccccagatgcacctcgttttaatctctttttttccacccctagctctagcctctcggaatttgtcttcttcagtggaaaccccgagaagactgatcagttcttcagttctaaaacaatggcccaggtaagtgtatatttctctttccttcttgagctatgatatttgcgttctgtgcatctgcttgtgaattatctgaagccttttatctagtcaagctctttataattacctgtttcccagctctttctattccagtgaatgataatgccacgtagctccgtgtctgcctttttgggaaatcactgagcaggtgattaagtatctcctgtttgctcccttttttggcaagggtaattttggagcagtgaagtagcaaagtcctttgagggaaatatttaagtcaagtctgtggtttgatgagttagatatgttggtcccatctgaccacatgagaaacagatcctccactgatcatgttttctgcgtagataagagggaatgctcatattcgccggtctgtcttagtatgtgctcagatcccaagctttatgggacttttggaaagggatggggctgtgattaggacctttgaacagaggtcatgttcctgccgggaaactggaggataaattttattattgaatggatctctcagaccacaagatgattctaagtcatctgacatccttatcctctaaatcagaaacagggggccgggtgtggtggctcacacctgtaatcccagcactttgggaggcccaggtgggtggatcacttgtggtcaggagttcaaaaccaacctgaccaacatggtaaaacctcatctgtactaaaaataccaaaattagcaggctatggtggcatgtgtccataatcccagctacttggtaggctgaggcaggagaattgcttgaacccaggagatggaggttgcagtgagccaagatcatgccactgcactccagcctgggcaacagagcaagactctgtctcaaaaaaaaaaaaaaaaaaaaatcaggaacgggggaaaggcagggttatggatggtaataaatatgaagatcttccagtatggaagtaggagatgatcacataccccagaatcggagaaagccttaggtgttttgggcaacctaagtgaataactgtaataaacagtctgacttacctgtgtgggaattttttaaatgcttaaaaggaagactgcttaaaatgtagtttggcatgatgaactggaggcttgaaaacattcaaacatgcaaaccgtattttctttttttttttcttgggacggagtttcactcttgttgcccaggctggagtgcagtggtgccatcttggctcacctcaacctctgcctcgcgggttcaagtaattctcctgcctcagcctcctgagtagctgggattacagggatgcgccgccacacccagctaattttgtattttaagtagagacgaggtttctgcatgttggtcaacctggtctcgaacccccaacctcaggtgatccgcctgcctcagcctcccaaagtgctgggattacaggcatgagccaccacacccagcaaaccctatcttcttttcttttcttttcttttctttttttttttgagacagagtctcgctctgtcgcccaggctggagtgcagtgccacaatctccgctcactgcaagctctgaccaccccgggttcatgccattctcctgcctcagcctcccgagtagctgggactacaggcgcccaccatcacgcccggctaatttttttgtatttttagtagagatggggtttcaccatgtttgccaggatggtctcgatctcctgacctcgtgatccgcctgccttgttctcgtgatccgcctgccttggcctcccaaagtgttgggattacaggcgtgagccccccgcccagccccagcaaaccctattttctaaaataaaagttcttaaacagaaatcttgatttttcttccccccttaaaagaaaaaatgctgtaggaatccacacttgttgagaacttataaggcaggcacgtagcagacactgcttgtaagcaagaagaaaacttggattgttttatccacttcctggcaggtttgactaactgaggattctgcacagtaaagtcattttctctgcagcggtagagctcttcagtgacatgcaggcattctgcttccgtcacagttacagtgatgtccttaccgccccttgccgatgtcacgggtgttcagtctgctcacggtgttcaccctacccagagggtggcctcctgtctccttcatctggaagctgtttcctttcatttcatcatgcacgtgtgggtttctgtttcagggtttggtgacgttcgccgacgtagccatagacttttctcaggaggagtgggcctgtctgaactctgctcagagggacctgtactgggacgtgatgctggagaactacagtaacttggtctcactgggtgagttgcacgcctcagataacttagactgcctcctggaatatccgctctcccctgtgaatttcaggaccgcctttcaagaaactagttgaatttcttcttcctgtccccaaggaatgtattgagccttattgatgtggccgtgagcaccacaaccttcccctcccatccatcggttaccttcccacctttgtcgactcccccgtaatcatctcacttccttaatgtccgtggaatgagtgggaattctgggatatttatttcatgaccatcttcaaaggagccagtttgtcctgtgagagtatgtttatacccaaattgctattggtggtcggtgttactctagggacccacgtctagggaaaacatgtggacacagtgccctgaattgttctagtaaaccagcctatgtgtttgaagtacagtagatcagacaaacagaatttgtgtaaaaccaaagtgggcgtatttcatttcttacataccatacctgaagtgaggttgaaagttacaatccccgaactgtgagttaaacattgaatgacaatatcttgcaaacatccctggaaacttatttttcttctagcaaaaataacaacaatgatattaatggctaagctgtctgtggtgaccctgcctgtaatcccagctactcgggagactgaggcaggaggatcacttgagcccaggagttgaaggctatagttagctatgatcataccactgtactccaggctgggtaacagatcaagaccccatcgctaaaacaataaacaaataggaatatatatattttatatatatacacacacatatatattatatatacacacacatatatattatatatacacatatatattatatatacacatatatattatatatacacatatatacatatacaatatatacatatatagtatatattatatatataaactgcttactgtgtgccatgcactgtgctaagcactgtgtgtgtaagtacattgcatttcgttctcacaggcagatgagacaggcacaatcattgtctattttggagatgaggatactgaaacacagtgatgcagtcagacggagggagcaggagctagaatcagatttaacagttttggtccccagattccttgctgccagccaccatgttccacttgcctccaggcataatgcctacagaaatttaaaatatgaccttttctcggccaggcgcagtggctcacgcctgtaatcccagcactttgggaggctgaggtgggcggatcactggaggtcaggagttagagaccagcctggccaacatggtgaaaccctgtctctactaaaaatataaaaattagccgggcatggtggcgcacgcctgtgatctcagctactccggaggctggtgcaggagaatcatttgaacctgggaagcagaggttgcagtgagccaagatcacgctactgtgctgcagcctgggcaacaaagcgagactctgtctcaaaaataataaaaaataaggccgggtgcggtggctcactcctgtgatcacaagactggcaggccaaggcagacggatcacgaagataggagttcgagaccagcttggccaacagagtgaaaccccatctctcctgaaaatacaaaaatttgccgggtgtggtggcgcatgcctgtaattccagctacttgggaggctgaggcaggagaatcacttgaacccgggaggtagaggtatagcatttctttttttttttaagttgagatttttttctttttttcactctgttactcaggctggagtgcagtggcgcgatcacagctcacagcagcctcaacctcctgggctcaagcaatcttcctgcctcatctccctgagtagcagggaccacaggtgcacaccacgacacccggctaattgttgtgttttttcttagagatgggatttcgccatgttgtccaagctgatcttgaactcctgggctaaaggaatccacccacctcagccttccaaagaggctggattacaggcgtgagccactgcacctggctcaatagcattttgacttctggttgttataaatttgattaatactcaatcaaaaaaaatttaaggccaggcatggtggttcacgcctataatcccagcactttgggagtccaaggcgggcagatcacctgaagtcaggacttcaagaccagcctggccaacatggtgaaaacccgtctctactaaaaacacaaaaattagccggtgtgctggtgtgcgcctgtaatcccagctacccaggagactgagtgaggcaggagaattgctgggacctgggaggcagaggctgcagtgagtcaagatcatgccactgcactccagcctgggcaacagagcaagactccctctcaaaaaataaaaataatttttaaagaatttttgaagttttgagcttgaaatttttcctcaagttctatgtcctctagcatttcgtttttttaaaggagggcatataatttctaagccagaggtactgtcttatagaattaagggaaagagccttgatggttgtgagggaagagacaagacaacaatacggaggaaagtgggagccagtcagccacccgtacaaagagcatccccacagggcagggaacaggcacaccctgaggtgttggagagctttctccaagagctcaggcccaaagcctctaggaaagaaagatcttaccacgaacttgatcttcaccccatttccctgtcaccttgtttttcctgtcatatttaaccccattttatgtgctgctggtgctgctggtctgtgggccacgcctttagtagcgggtagaggtgacagggtcctctgccctttatcattcctgaaagtgggttagcctcgctttaagtgcccgttttctttttctcatatctaggtgttggcagtactgcttcccgggtgttgttaatgtgtcaccaccatgaagcacctggtgtctggttgtagctcctctttgccattggcagtcattggcactgcttacattcatcacactgggggctcaaatggtgcgcgcctatcactgccccttcatttatcagctgttataatttaaagagaaactttgtttcatctgctaattgctcatgcagtggcactgttcatattggataagaaggataaaaactttgttctttttctttgtcagtttttatgttgtatttttttcttttcttttttttttttttttttgaggcagggtcttactctgattcccaggctggagtgcagtagtgcagtctgggctcactgcagccttgacttccgggctcaagccatcctcccacctcagcctcccaagtagctgggactataggtgtacaccaccacacctggctaatttttgtattttttttgtagagacagggttttgctatgtttcccaggctggttttgaactcctgagctcaagtaatccacccacctcggtctcccaaagtgctgggattacaggcgtgagccactgcacctagccaattgccagtttttataataaaggtctggtttcctagcgtgttccagagctggccatttaacattttgtagtatcattatgaacttatagatttaaacgtttgctgtttctcagtcctttgcagttagcctccttattgatgctcaagttctaaacttttccttattgttcttctaaactttttcacattttttattaaatttagtctcgtaaattatcttttttgttgcttttgaatgttgtattcttttacccagttgcttttttttttttttttttttttgagacggagtcttattcagtcggctcactgcaacctccacctcccgggttcaagcgattctcctgcctcagcctcccaagtagctgggattataggctcacaccaccatgcctggctaatttttgcgtttttagtacagacagggtttgtttgtttttgttttttgttttttgtttttttgatatggagtctagctctgtcacccaggctggagtgcagtggcacaatctcggctcaccgcaacttctgcctcccgggttcaagcgattctcctgcctcagcctccggagtagctgggattacaggcacccaccaccatgcccagctaatgtttgtatttttagtagagacaggatttcaccgtgttggccaggctggtctcgaactcctgacttcatgatctgcccacctcggcctcccaaagtgctgggattacaagcgtgagccaccgtgcccagtctgtttttttgtttttgttttgagacagagtttcatgcttgttgcccaggctacagtgcaatggcatgatctcggctcactgcaacctctgcttcccaggttcaagcaatttccctgcctcagcctcccgagtagctgggattacagtcatgcgccaccatgtccggctaattttgtatttttagtagagacaaggtttctccatgttggtcaagctggtctcggactcccgacctcaggtgatctgcctgccttggcctcccaaagtgctgggattacaggcgtgatgagccaccactcccggccctttaccagttacttttaataatactactgacatatacgtgtatcagtttcagaatgctttacacacagccatccaactgcatattgttttgttacagtacttctatatttggttttccaagtatatcatcacatcatctacaaatacttgttttcatcttcaaaataggaaataataggactaattgtcgggacctttttcatgtctgactttaaaatagatgtctccaatgaattctcagttagtattgtaccagaagtagaatctacattttaacaagagccctgggtgattcacatttattctactggataatttttatttctattagacgagtttttggtttgtggttaggttcgtttgtacttgtgtccctctaaaggaaagaaaatatgttcttttttcccagatttggagtcagcatatgaaaataagagtttacctacagaaaaaaacattcatgaaataagggcttccaaaaggaattcagatagaagaagtaaatcccttggccgtaactggatatgtgaaggtacgcttgaaagaccacagcgctccagagggaggtatgtcaatcagatgatcatcaattatgtcaaaagacctgctactagagaaggcacccctcctagaacacatcagagacatcataaggagaattcctttgaatgtaaggactgtgggaaggcctttagtcgtggctatcaacttagtcaacatcagaaaatccatactggtgagaaaccttatgaatgtaaagaatgtaagaaggccttccgttggggcaatcagcttactcaacatcaaaaaattcatactggggagaagccctacgaatgtaaagactgtgggaaggcttttcgatggggctcaagcctcgttattcataagaggattcatactggtgaaaaaccctatgaatgtaaagactgtggaaaggcctttcggcgtggtgatgagctcactcagcaccagagattccacactggggagaaagactacgaatgcaaagactgtgggaagacctttagccgtgtgtataaacttattcagcacaagagaattcatagtggggagaagccttacgagtgtaaagactgtgggaaggcttttatttgtggttcaagcctcattcagcataaaagaattcacacaggtgagaaaccctatgaatgtcaagaatgtgggaaggcctttactcgagtcaattaccttactcagcatcagaagatccacaccggtgagaagcctcacgaatgtaaggagtgtgggaaggcctttcgctggggttcgagcctcgttaagcacgagaggatacatacgggcgagaagccgtacaagtgcacagaatgtgggaaggccttcaattgtggctatcacctcactcagcacgagagaatccacacaggcgaaaccccgtataaatgtaaggagtgtgggaaggctttcatttatggatcgagcctcgtgaaacatgagagaattcataccggggtgaaaccctatgggtgtacagaatgtgggaagagctttagtcacggccatcagcttacacaacatcagaaaacgcacagtggggcgaaatcctacgaatgtaaggagtgcgggaaggcatgtaaccacctaaaccatctccgagaacatcagaggatccacaacagttgaagagccttttgaacgcagtagcccgctcgtatctatggtttcgctttccacagtttgttacctgcagtcaactgcagttcaaaaatattaaatggaaaattccagaaataaagaattttaagtctcaaatggtgtgcccttctgagtagcgtgatgaaatctctcgctgtccggctccagccggccggggatgtgagtcatcccttggtccagcacatccacgctgtatacgccacccaccctgctagtgacttagtagccgtcttggtgatcagatcaactatcccagcatcacagtgcctgtgcccaagcagtcctcactttgcttaacagtggccccagagagcaggagtagtgatgctggtgattcggatatgccaaagagaagccacaaagtgcttccttttaaatgaaaaggtgaaagttctcaacttaaaaaagaaaagaaaaaaatcatatactgaggttgctaagatctacatgacaataagatattttgggagagagatacgttcacataattttattacatatattgttacaattgttctattttgttagttactgttggtaatctcttactgtgcctaatttataaattaaactttagatatgtatgtacaggaaaaaatgtagtatatagtatcgtatatatgtacaggaaaaaaacgtactatctgtggtttcaggtgtccactgcgggtcttcaaacgtacccccctcaggtgagaggggactgctgtacaaagaatataggaaggcctctagactacatccattccttcctcaacaggaggaaaattcctggtacagtttaacgtaaggcttcactgatcactgttgtttttgtttttgtttttgtttttttgagacagagtctcactcttgcccaggctggagtgcagtggcacggtcttggctcactgcaacctccacctcccaggttccagcaattctcctgcctcagcctccccagtagctgggattacagacatgcaccaccacacctggctaatttttgtatttttagtagagacagttttcaccatgttgtccaggctggtctcaactcctgacctcaggtgatccacccaccttgccctcccaaagtgctaggattacaggcgtgagccactgcacctagcccactgatcactcttctgcttacagaatatcagaagtcattctagaggcaaatttgaagagtggaaaaatcactttttctgaatgatcttgtttttggtgtagatgtttttattgtgtgggttagtttaatgaatacataaagactaccagtaccattctgtctttactccgtggcatctgtggaataaccctgctaatgtaacacgtgagaaagcctttggtcatgccacccactctaccagttgtccccaccatcccccgccctcctccctgtgagacactgggccaaaggctcactacccctgtgcgttgtccagcacacagacactatgtgcattatttgtacataaggataatcacatctacctgagactgctatcatggaaattaaatgtttggtacatgtaaagtctttgaaagtgtaactggaatattgtgtaattttaataaataataactattgttgtttttatgatcattactaccatttgtgttgccattagtgaatttttacaagaaaactccctgtgggtgcaatgagtctggaaaagaccattgagtcttctagaagaaaacattaagagattattggcacagccgtgggttacgcaatgatttcttagtacacaaaacacagcaaacataaaaagttgttacacttcatcaaaagtacaaagttctgttcatcaaatgatgctgttaagatagggaaaagacaagaaacaggactggaagaagatgtttgctctaaggtacacctgacaaaggaactctcatagaaaatataaagaatccctcaagttgaaaaaaaaatcaatttaaaggggagaaaacttcagcacgtctcaacagaagaccaccaaatggccaataagtaagtgaaaatgtattcaatgtcattgctcctcaaggaactgtagagtaaaaccacaatgtgctgtcactctagacagtcaccaggatgattaaatttaaatcacaataacaaggctgatttcagatgtctcaccacaaagaaggaggataagggagcgaggtgatggatatgttaattagcttgatttaatccttccacattgtatacatgtatcagaacatcacattgtactccatcaatataatacaattattatttgtcaatcaaatattaataaaatcaaagatgagcaggtctctttgttggatattcaaacacgacctattcaagaaggaaccccgccagcagactggacctctgctaaaccctagcggtgcccacagcagggacagcgcgggagggaggtgagcggactggtcctggggacggggtcagggcccagagtagagttgttacaggaaaggggtgccaatccagaccccaggagagagttcttggatctcacacaagaaagaattcaggacaagtcctcagtgcaaagcaaaagcaactttattaagaaagtaaagtggtgggaccaggtgcggtggctcacgcctgtaatcccagcactttgggaggccgaggtgggtagatcacctgaggtcgggagttcaagaccagcctggccaacatggcaagaccccatctctactataaatacaaaattagccaggtgtgtgggcacacatctgcagtccagctactcgagaggctgagccaggagaatcacttgaacccgggaggcagaggttgcagtgagctgagatcacaccactgcactccagcctgggcgacagagggaggctccatctcaaaaacagaaaaagtggcgaaaggacagctactccacagacagtgttggacgctcctgacgttaggaggaacgcatccaccctaggtccaatgctcacatatatggggagacgtgctctgctacaagggtttgtgatgaaggattcattctcttcattattttgcaagaattgatattatctttaaagcaaaactaggaatgcctttgttctccagatatcaggatatctggacactcccaagtgtgggtctgtttagtaactgttaataatttgttcccttaaccgtaaacatctggaggctcggaattgcctacatttctcagaatgcagcccagcaagtctcagcctcattttcctagcccgcactcaaaatggagtcgctctggttcaaacacctctgacagagtcctgggggaggtgcggacacagactcaggggagagacctgaactatcttaagatggtcctaggctgagggtaggattaccttagggaaaggaccagagcccatagtaggaatcggagaatatggattggggaggactctagaccccatgggagtgagtttgacggggcagaggagtggctaatgggcatgggagggcctggctagagctcagggatgaattctgggagagaagggatagaggcctggagagaggccttggggctgggagaggactggagtgctcctgagagcagctgcggagatggagggcggacgctacatcctgcaggagagccttaggcacgggggatggtggtgtggttagagctcaggggtgtcctataaaggttggcaaaggatccagaatatagggttgaagtcctgcttgtttgatttacctcaagggtagggttacgtttcaatcaaagctgcttagttctcggattacaaatacctcagcattaggttaaggattcagattctccaggggtggtggggaagtgagggagcatgtttggggaaggggttccagacccaggtttcagagctgggtatctttctggtctaggcttcagtacccttaggaatcaacctcataggcggcaccgtcctgcttagtgcccctttcccctgtggaccctacgccagcctcagcagaaggggcccagggtcccttccttgccaccaagagcaacacgcatggtggggccactgctcttcccagcattcccgcataaacagaggaggagctgggtggggtaaggagaagggcaggggaaggagtgtgaagaggagaagcaggtggaagacagtgagaggaggctggaggaatgtgggagtaggggtagggagaatactgagaaacgaggaggctgtgcagaaaggcagcactggcctggccttacaggacacagccaaggcacaggaagacagcctgggtggacagggttagttcccagaaggaaatatgggaagaatgtgtgtcaggcaggactcttggctcaaggagcaaaatccaaagtttatataaaaagcccagaggtgggccaacgcggtggctcacgcctgtaatctcagcacttcgggaggctgaggcgagtggatcacttgaggtcgggagtttgagaccagcctggccaacacagtgaaaacctgtctctactaaaaatgcaaaaattagcccggcacaatggtgcacacctgcaatctcagctactcgggaggctgaggcaggagaatcacttgaaccgggcaggcggaggttgcggtgagctgagatccagccagtgcacttttttgagacagagcaagactccatctcaaaaaaaaaaaaaaaaaaaaatcccggaggtggccaggcgcagtggcccatgcctgtaatcccagcactttgggaggcctaggcaggcagatcaactgaggtcagcagttaaaaaccagcatggccaacttagtgaaaccctgtctctactaaaaatacaaaaattagccaggcgtggtgacccacgcctgtaatcccagctactcaggaggctgaggcaggagaatggcttgaacccaggaggctacggtgagctgagatcgcctcgctgcactccaacctgagctacagagtggctaatttttgtatttttagtggagacggtacagtggttcatgcctatactcctagtactttaggaagccgaggtgggcagatcacctgaggtcaggagttcaagaccagcatggccaacatggtgaaactccgtctccactaaaaatacaaaaattagccaggtgtgatagcgcatgcctgtaatctcagctactcaggaggctgagacaggagaatcgctggaacccaggaggcagaggttgcagtgagccaatatcgctccactgcactccagcctagccggcagagcaagactccgtctcataaaaaaaaaaaaataataataataataaagtttaccctagcttgggcaacatagtgggattctgtctctacaaaaaataaaaatattagccaggtgtggtggtgctcacttgtagtcccaactactcaagaggctgaggcaggaggattgcttgagcccaggaggtggaggctacagtgagtgatgattgcatcactggattccagcctggataatgacaaaaaaacaaacaaaacaaacaaaaaccctacaaagagcagtaacaacaacaacaaaaaaaaaacagggcgggtacagtggctcacacctgtaatcctagcacttggggaggctgaggtggacggatcacctcaggtcaggagtttgagaccagcctgaccaacatggtgaaaccccgtctctactaaaaatacaaaaattagccgggcaaggtggcgcatgcctgtgatcccagctactcaagaggctaaggcaggagaatcgcttgaactcaggaggcggaggttgctgtgagccgagggtgtaccacttcactccagcccgggcgacagagtgagactctctcaaaaaaaaaaaaaaaaaaaactacaaagagcagtaaaagccatggggtaaagggtaaccatgaagtcaaagagctttactaaagtaagtcattattgagccgggcttggtggcttacgcctgtaatcccagcactttgcggggctgaggcaggcagatcacctgaagtctggagttcaagaccaaccaggccaacatggggaaacctcatctctattaaaaatacaaaattagctgggtgtggtggcagatgcctgtaatcccagctacttgggaggctgaggcaggagaattgcttgaatccgggaggcggaggttgcagtgaaccgagaatacgccccattgcactccagcctggacaacaagagtgaaactctgtctcaaaaaaaaaaaaaaaaaaggaggtacatgagttgtacgcaaaagctacaaaacagttgaagttgtagaataatttttttaaaaaacctaaataaatggaagggtttttttttgtttttgagacggagtctcactctgtcgcccaggctggagtgcagtggtgcactctcagttcaccgcaacctccacctccccggttcaagagactcctgccttagcctcctgagtagctgggactacaggcacctgccaccatgcccagctaatttttgtatttttagtagagccagggtttcgccatgttgaccaggctggtcttgaactcctgacctcaggtgattcacccgccttggcctcccaaagtgctgggaatgaaaggatatttcatggtcctgaattggaagatttaatattgttaagatgatggctgggcacggtggctcatgcttgtaatcctagcacttggggaggctgagggaggaggtttgcttgagcccaggagttccagaccagccttggcaacatggcaagatcccatctctgtattatttttttaaataaaatttcaaagataacaatattacccaaagcaatatatacatattcaatgcaatatcaataaaatactcaatgacaattttttgcagaaatggagaaaccaactcttagagttgtatggaatttcaagacaccccaaatagccaaaataaagaacagtggaggactcacacttctggatttcaatttttttttttttttgagacggagtctcactctgtcacccaggttggagtgcagtggcatgatctcggctcaccacaacctccacttcccaggttcaagcaattctcctgctcagcctcccgagtagctgggattacaggtgcccaccaccatgcctggctaatttttgtatttttagtagagatggggttttgctatgttggccaggctggtctcaaactcctgacctcggatgatctacctgcctcggcctcccaaagtgctgggattacagatggagccactgcacccggcctggatttcaaaaaaattttaaaaagcaatagtaattaaaacagtgtggtatacgataatggcaaaaggatatacatacatggctggcgtggtgttgtgcacctgtaattccagctactcaggaggctgaggcaggagaatcgcttgaacccaggaggtgaaggttgcaatgagccgagattgtgccactacagtccagcctgtgcaacagagtgactttctgtctccaaaaaaaatttttttacttaaaaaaattacataaatattatatgtataatatctaaaaaacaaaatacaaaaatagccagatgtggtggcacccacctgtagtcccagctactcaggaggctgaggcgggaggatcacctgagcccatgagcccaggaggtcgaggctgcagtgagctgtaattgcgccactgcactccagcctgggcaacagagtgagaccctgtctctaaaataaataaataggccgggcgcggtggctcacgcctgtaatcccagcattttgggaggctgaggcagggggatcatgaggtcaggagatcgagaccatcctggctgacactgaaaccccgtctctactaaaaatacaaaaaaaaaaaaaaattaggtgggcatggtggcgggcacctgtagtcccagctactcgggaggctgagacaggagaatggtgtgaacccaggaggcagagcttgcagtgagccgagatcacgccagtgcactccagcctgggtgatagagtgagactccatctcaaaaaaaataaaaaataaataaataaatacaagctagaagggttttgaatgttcacaatacaaataataaatgtttgaggtgatggatatgctaattaccctgatttgatcattacacattgtgtacagaaatcaaattatcactccatatcccataaacacatgtaattattatgtgtaaaataagaaataaagaatttatgagaaattatttgctacagagcagacatcattgtctggagaggcagtaattacacaaagttatagaagccgaggagcaattgggaaggttctgatctcttttaggcacctgtggctgagtgaaactcatcaccaaaacaagccccatctgaacccatgcacgcagcaagatcaacagaataactctgcgcacatttcacaggctctttggacaaatgtatggggtgtcctcacctgagtttgcactaaacctggagtcatttatttcacaagttttcacaacaccaagggtcagcaaactctctgttaagggccggttagtaaatattttactagacacatattttgcagggcgcatatgttctctgtcatgtagtcctctttatttttacaagctttaaaaaatgtgaaaactggtagggtatggtgagtcacgcttgtaatcctagcattttgggaggccaaggcgggagaatctcttgagttcaagagactagcatgggcagcattgagagacctcatctctacaaaaaatggaaaacttagaagggggtgatggcgctcacctgtagtctcagctactcaagaggctcaggtgggaggatcccttgagcctgagaggtcaaggctgcagtgagctgtgatttcagaactgcactccagcctgggagtcagagtaagaccctgtctcaaaaaaaataaaaagaaaaagaaaagaaaaaaagaaaaatgtgaaaaccactcttacccctagaatgtacaaaaagatcctggaacagtggtgcacacctgtaatcccagcactttagaagccaaggcaggacgccccgtccgggagggaggtgggggggtcagccccccgccaggccagccgccccgtccgggaggtgaggggcgcctctgcccggccgcccctactgggaagtgaggagcccctctgcccggccaccaccccgtctgggaggtgtacccaacagctcattgagaacgggccatgatgacaatggcggttttgtggaatagaaaggggggaaaggtggggaaaagattgagaaatcggatggttgccgtgtctgtgtagaaagaagtagacatgggagactttttattttgttctgtactaagaaaaattcttatcctgttgatctgtgaccttacccccaaccccgtgctctctgaaacatgtgctgtgtccactcagggttaaatggattaagggcggtgcaaggtgtgctttgttgaacagatgcttgaaggcagcatgctcgttaagagtcatcaccactccctaatctcaggtacccagggacacaaacactgcggaaggccgcagggtcctctgcctaggaaagccagagacctttgttcacttgtttatctgctgaccttccctccactattgtcctatgaccctgccaaatcctcctctgcgagaaacacccaagagtgatcaataaaaaaaaaaaaaaaattaaaaaaacaaaacaaaacaaaacaaaaaaaagaagccaaggcaggagaatcactagaggacaggagtttgagaccagcctgggcaacagagcaagactctggcctgggtgcagtggctcatgcctgtaatcccagcactttgggaggccgaggtgggcggatcacctgaggtcgggagtttgagaccagcctgaccaacatgacgaaaccccgtctctattaaaaatataaaaattagccagtcgtggtggcgggtgcctgtaatcccagccactcaggaggctggggcaggagaattgcttgaaccagagaggcagaggttgcagtgagctgagatcgcaccactgcacttcagcctgggagaaagagtgagactcccagttaccggggaggctgaggcaagagaattgcttgaacctgggaagcagaggttgcagtgaactgaactaggaaagaaaaaaaaaagatggggttttgctatgtttcccaggctgctcttggactcctgggctcaagtgattctcccacactggcctcctgacctcaggtgatccgcccaccttggcctcccagagtgctgggattacaggcttgagccactgtacccagccccctccaggatttttacagttggacatctcacatttaaatctttagtcttgagtcaatttttcaatatggtgaaaggtaggagtccagtttcattcttttttcttttttttttttttttttttttttagaaaatcctaggccaggtgcagtggctcacacctgtaatcccagcactttgggaggcccaggtgggtggatcacttgaggttaggagttcgagaccagactggccaacatggtgaaaccctgtctctactaaaaatacaaaaattagtcggttgtggtgatgggcacctgtaatcacagctactcaggaggctgaggcaggggaattgcttgaacccaggaggcagaggctgcagtgagctgagactgcgccactgcactccagcctcggtgacagagggagaccctgtctcaaaaagaaaagaaaatcccgttaattattctaccaaaaagacatgtgtactcatatgttgattgcagcgctatgagtgctgacagtctcactctgtcatccaggctggagtacagtggcgtgatcttggctcactgcagcctctgcccaccagactcaagcaatcctcccacctcagcctcccgagtatctgggactgcagacacgtaacaccactctcagttaatttttctttaatttttgcagagacagggtctggccatgttgcccaggtcagttttttttttttttttttttttttgaggcagagtttcactcttgttacccaggctggagtgcagtggcgcgatctcggctcaccgcaacctccgcctcctggtttcaagcaattctcttgcctcagcctcctgagtagctgggattacaggcatgtgccacgacgcctggctaatttttgtatttttagtagagacagagtttcaccatgttggtcaggctggtctcaaactcccgatctcaggtgatccgcccatctcggcctcccaaagtgctgggattacaggcatgagccaccgtgcccagcccgcccaggtcagttttgaactcttggactgaaagtatctcatcttgccctctgaaagtgctgggattacagacatgagccacactacaccctgcccagtgtcaaccttctgcatatggctagccggttatcccagtggcatttattgaataggaagtcctttccccattgcttgtttttgtcagttttgttggccatcagaaggttgtaggtgtgtggcttcatttctgggttctccatgctgttccattactctatgtgcctctttatttttattttattttattttatttttttgagagacagtctcaccctgtcacccaggctggagtgcaatggcgcaatatcagctcactgtaacctctgcctcccgggttcaagcaattctcctgcctcagcctgccaaatagctgggattacaggcatgcaccatcacgcccaggtaatttttgtgcttttagtagagatggggtttcaccatgttggccaggctggtctgaaactcctgacctccaatgatctgcccactttggcctcccaaagtgctgggatcacaggcgtgagccactgtgcctggcctatgtgtctttttgtaccagtaacatggtgttttggttactgtatacttcttttgttttacatttactggcttattataaaggacattacaaaggacacagacgaagagatgcataggacgaggtatgggagaaggggtgaggagtttccgcgccctccctcggcacactaccctccaggaggcatccaagtcttcagctatcaggaagctcctagttactgtttccttgtacagtttgaagctggaatgtcatgcctccagttttgttcttttggcttaagattgctttggccattgggctcattttaggctccatatgacttttacaatagtttttttttttttttttttgggacagtctcactctgtcacccaggccggagtgcagtggcgtaatgtcagtttactgcaacctctgcctcccaggttcaggcaattcccctgccttaggctctcgagtagctgagattacaagcacgtaccaccacacctggctaatttttgtatttttagtggagaaggggtttcgccacgttggctacgctggtctcaaactcctggcctaaggtgatccgcccgcctcggcctcccaaagtgctgggattacaggcatgagccaccgcgcctggcctacaatcattttttataattctgtgaaaaataatattggtagtttgatgattctagattgctttgggtaatatggccacttaaaaattattttaattattaaaattgggggtacatagtaggtgtatgtatttacgggttacatgaaatattttgaaacagacacacaatgtacaataatcacatcagtgtaatgggatattcatcacctcaagcatttatcctaatatggccttttgttttggagatggagtctcactctgtcgcccaggctggagtgcaagggcacgatctcagctcactgcaacctccgcctcccaggttcaagtgattctcctgcctcagcctcccaagtagctgggattacaggcgcctgctaccacgcccggctaatttttgtatttttagtagagacaaggtttcaccatgttggtcaggctggtctccaactcctgatctcgtgatccacccgcctcggcctcccaaagtgctgggattacaggcgtgagccaccttgcctggcaatgtggtctttttaacaatattgattctgccaatccatgagcaaggaaagttttttcatttgtttgtgtcaaggatttctttcagcagtgttttgtttgttttttgagacagagtctcactatgtcacccaggctggagtgcagtggtgcaatctcagttcattgcaacctccgcctcacaggttcaagtgattctcctgcctcagcttcccgagcagctgggactacaggtgcacagcaccacgccgagctaatttttgtatttttagtagagacagcgtttcaccatgttagccaggctggtctcgaactcctgacctcaagtgatccacctgcctcagcctcccaaagtcctggggttacaggcatgagccactgcacctggcctctttcagcagtgttttgtagttctccttgtagagaccttccagttccttggttagatctgttcctaggtatttgtgtgtgtttgtgtgtgtgtgtgtggctattgtaaatgggattccgttcttgatttgactctcagcttgaacattattggtgtatagaaatactactgattttcatacattgatttcatatcctgaaattttactgaagttgatcagttctaggagccatttggcagagtcttcagagttttctaggtatagaattatatcatccgtgaagagggataacttgacttcttcattccattcccttttgggatgccttttcttcctttctcttgcctgattgctccgactaggacttccagtactatggggaacaaaagtggtgtgagtgggcagctttgtcttttgcctgttcttaaggggaatgcttccagcttttgcccattcagtacgatgttggctgtgtgtttgctatagacggctcttactattttgaggtatgttccttcaatgccaagtttgttgagggtttttatcataaagggatgttgggtttttttttttttttaagatggagtctcgctctgtcgcccagactgtggcacaatctcagctcactgcaacttcaacctcccggattcaagcaattctcctgccttagcctcccaagtagctgggattacaggtgcctgccaccatgcttggcttatttttgtatttttagtagagacagggtttcaccatgttggccaggctggtctcgaactcctgatctcaggtgatccacccacctcggcctcccaaagtgctgggattatgggagtgagccactgcagccggccaggtgccagaattcttaacactggttccttctcatctagaaactctggcccttctaatttctgtaattattttcatgtggatagaaactttttctttttctttccctacattattattgtccgcctcccctttcccctactccctagggagtgtgattgcatagaatgttgggtaggctttttggccttgtttctataggcttatgcagtttttttttggcaggttttatttatttatttatttagagatgaagtcttgctcccatcgcacacgctggagtacaatggcaccatctcggctcactgcaacctccacgtcccgggttcaagcgattctcctgcctcagcctcccgagtagctgggattacaggcgtgcaccaccatgcctggctaatttttgtatttttagtagagacagggtttcaccatgttggccaggctggtctcaaactcctgacctcaagtgatctgcctgcctcagcctaccaaagtgcaaagattacaggcgtgagccactgtgcctggtctttggcaggttttgttttgttttgttttgttttgttttgttttgttttgagacagagtctcgctctgccacccaggctggagtgcagtggcatgatctcagcttactgcaagctccacctcccgggttcacgccattctcctgcctcagcctcctgagtagctgggactacaggcgcccgccaccatgcccggttaattttttgtatttttagtagagacgggatttcaccgtgttagccaggatggtctagatctcctgacctggtgatccgcccgcctcggcctcccaaagtgctgggattacaggcgtgagccaccgcgcccggcctggcaggttttatattggactgtgcagttcaacctacaggccaggagatggcacttcgggctgaaagttgccggcagcagaagcaggtgggcatgtacctgatcttggtttcctgggaggtactgtctgttgtttcaggtcatgggctggagcatggagtgcccggtgccatgagcttcctgttccctggggtgggggacacggctgggcagagctggagcccatagcttgcacaggaataccccaatgatgaaggcaggcaccaggccgatgagggtggctgagaggagctccaggtgaaatgcgctgaggcctctgtgtagggctgaggggtgaggatattgcaccggctcctcatctagattggcaggaacgtgaatcgtgtccctgtcacacccctatcgtggggttcgtggctcctagttcagatgcacactgtactcctttcttctttttttttgagatagtcttctcctgtcgcccaggctggagtgcagtggcatgatctcagctcactgcaacctccgcctcccaggttcaatcaattttcgtgcctcggcctcccaagtagctgggattacaggtgccaaccaccacgcccggctaatttttgtatttttagtagagacagggtttcagccaggctggtcttgaactcctgacctcaggtgatccactcgcctcggccttccaaagtcctgcgattacaggcgtgagccaccaagcctggccactgtactgcttttttttttttttttttttttttttttgagatggagtctcgctccgtcacccagacttgagtacggtggcacgacttcggctcactgcaacctccgccttcgggattcaagtgattatcctgcctcagcctcccgagcagctgggattacaggtacataccaccacacctggctaatttttgtatttttagtcgagacagggtttcaccatgttggccaggctggtctcgaacttctgacctcaagtgatccacccaccttgtggctcccaaagggctaggattacaggcatgggccacatcacccagccagcacactgcactgtttcccaggaccacagtgtggtggagagcctcgggaaacgcctgtttcgtggctctctatggagtggttttggagctgcacatggtcactcagcctggtccagggagatttagggctcacctggcctctcatatggtggcactgctgcttcatgtaagaggggcaccacctctggggctgtgcaggtgtgtgttgtggtggtggccagctggctgggcccaacctcaggccctgagggaagtggtcgggtaccagcagtgctggaatggggtgggcagtaccccaattccctgagccctagatggcccactggaatgcatggatgagtgagtcccattgggactggaatggaggtggggctagagcagcgtccagtgctgactctgatggtggggtacgggctggtcccctgctcactggccaactctccagcgggtgcaggcagagtactccggcggtgggagcctggggggtgatcccaggcctgtcggatagggttggcagacgggcactctctgggtcacagctgaaacacctggggagtgtgggggtgggcaccggaagccaggaggtggcaagcccctctgggcagggagcctgtggtagacagtctggagccatgggaaagttggggccccagcctgagggcagcagtggcaggaccgcagtggcagccaccacggagggcctgtcagttacctctgggagtttcctgccagaggaatgtggaggccaccgaccagggtgctgaggccagggtgggtcagctgtgctgggggcccaagccggtcagcctggcctggcaaggagcagcggaggcaaggcctgaagcccatccatcccctcctcagtgcgatcctagtgtaacttcgccaggggtcctttccaccctctgcataaagacagaccagggcatggcaggagagaaagagtttgacagacacgaggccggtcatgccacgtgggagatggagttcatactcaaaccatccaaggctcacaggttaggttttcaaaggcagtttggaggaagtaaaatcaaaggcaacttggaaggggttggggggggggtccccaggttacagatgcttgctactgattggttggggcagagatgaactcctaggcctcctgggggccaattcgcatttaagtggggccaccggagcggcattgttggtccaggtgcagccgagggtgtcagacatgcaaaaaacctggaaaggtatctcaaaaaccaactggggaagctgtttatcttacaacttctggaacgtcagcgccttagctggattcaggttcctttcactgcctcagcctgatgggctcctattagctttacaaaagcagttgagtttgcagtaaagcctattatcatttaaactgtagcctaaatgtcttccaaaattagcttggcccaacagcccaggattaattgagggtgagttagcttagtttactattcgcattttctcactgacagaactttcgtacaggcggcttcactagcaggcggacaaagagcctggccttccttgttgctggggctgtggcagctgacaacagggtgctcatggggtgtgcagggatccaaggcctgtggggctccgcacgggcttgaacggtgctctgcggagactccaggctgcctccatgttgctctggaagctcagggggtcaggggggctcttctccgcccaggattgcaaaggattgtgttagaagtgtgggtccctggccgggcatggtggctcacatctgcaatcccagcactttgggaggccaaggcaggtggatcacccgaggtcaggagttcaagaccatcctggccaacgtggcgaaacccccttcactaaaaatacaaaagattacccgggcgtggtggcgagcgcctgtaatctcagctactcgggaggctgaggcaggagaatcgcttgaatccgggaggcagaggctgctgtgagccaagatcacaccactgcactccagcctggacgacaagagtgagactccatttcaaaggaaaaaaaagtgtgggacccccagggactctcactcttaccctttctctgcatcagggagcttcccccaactccgctgcaatcccaggagggcagctgcccaaccttgcctgttctccaagtcccaccgcagccctggtgaatcccagcatggtgttctggtctatgcccttgaagaccgggcagttaccctgtttcctctccatgaaagcagcgcactggggggaggggggagggatagcattgggagagatacctaatgctagatgacgagttagtgggtgcagcgcaccagtatggcacatgtatacatatgtaactaacctgcacattgtgcacatgtaccctaaaacttaaagtataataataataataataaaaaagcagcgcacactagctgcgtccaccagccatcatgaactgcaacccacaatcacatttgttaatagtaaaatattttcatactttattttatttgtatattttatattaagttaatattttatttttataatgattatatgttaatgttttctattgattaatgttaatattttgggtattagaatgtgggtattttgggttagaatttcaagttatttttgctttttttttgagaagagtctcactctgtcacccaggctggagtgcagtggcgcgatctcggctcactgcaagttctgcctcctgggttcacgccattctcccgcctcagcctctggagtagctgggactacaggtgcctgccaccatgcccggctaattttgtttttgtattttagtttcaccgtgttagccaggatggtcttgatctcctgaactcgtgattcgcccgcctcggcctcccaaagtgcttggattacaggcgtgagccaccgcgcccggcctatctttgcttttttaatgtggctactagaaatattaaaattacatacttggccgggcgcggtggctcaggcctgtaattccagcactttaggaagctgaggcgggcaggtcgcctgagggcaacctggccaacatgttgaaactaaaaaatacaaaaattagccgggcgtggtggtgcatgcctgtaattccagctattccggaggctgagccaggagacccctttgagcccaggaggcagaggttgcagtgagccaagattgcgccactgcattccagcctgggcaagagcaagactgtctcaaaaaaaaaaaaaaaaaaagaaattacatacttgctctcattgtatttgtttggacagcaccagttctagatacaaatgtggcagtatttttcaaaatcttttattcttgagacagagtctcgctctgtcacccaagctggagtacagtggtgcaatctcggctcaatgcaacctctacctcctgggtttaagcgattctcctgtctcagcctcctgagtagctgggattacaggcgtgtaccaccatgcccaactaatttttgtgattttagtagagacggattttcgccatgttggccaggctggtctgcaactcctgacttcaggtgatccgcccgcctcggcctccagggctggaactataggcgtgagccaccgtgccaggccaaaaatctcttaatgtctattctttgagtcaacatttccacttattacactgctttttgttttttgttttttgtttttgagacagaatctagctctgtcacccaggctggagtgcagtggtgcaatttcagctcactgcaacctccacctcctgggttcaagcaattctctgcctcagcctcctgagtagctgggattacaggcgcctgccatcatgccagactaatttttgtatttttagtacagacggggtttcaccatcttagccaggctggtcttgaactcctgacctcatgattcacccacctcagtctcccaaagtgctgggattacaggtgtgagccaccgtgcccggccacaccatttttatagcattaatttaactttcttccatgatgtagatacatggacattgtcatttacccaaggaacttcctgttatatcctcaggatctccttagtaaaaattacactgatcagactttctatgcagtatgtggcaaaactcatgaggatatcggaggaacaatctaccttctctcttttgccagactggactgacagtcattcagctataatgtagcaagtgaactagacaactgaaactttaaataaggacacaaaatgagagagttaagtattttgacaaaagtcttaggtgaaatcaagccaactgctctgcaggcagggactttaatggtaagacacatcctgagtaaacaggtagaatgccgttgcgcttcaagccatgccgggaaacagaagaggagccgaggtcaggaaagattgagggcatctgtggaattcgcaattttactcaggatgtaaggttaagtcttgctaagaatgtgactttcagtaaagatcagatacaagtgtcctagaagacgccagagaaaatctgtttgaagtaaacatgatggccgggcacgctggctcacgcctggaatcccagcacttttagaggccagaggcaggaggatggcttcagctcaggagttcaagaccagcctcggcaacaaggtgaaactccatctctactgtaaatacaaaaattaccctggtgtggtagcgcatgcctgtattcccagctactcgggaggctgaggcaagaggatcacttgaggccgggagttccagaccgcacctggctatttttttttttttttgagatgaatttcactcttgttgcccaagctggagtgcaatggtgcaatctcagctcactgcaacctctgcctctgggttcaagcctcagtctcccgagtagctgggattacaggcacctgccactgcgccccagctaattttttgtatttttagtagagacagggtttcgccacgttggccagactggtcttgaactcctgacctcagatgatccacctgccttggcctcccaaagtgctgggattacaggcatgagccaccgcacccggccattttaaatgtttttaccacaaaaaaaaaaaaaaatggcacgtaaggctgggtgtggtggctcacgcctgtaatcccagcactttgggaggccgaggcgggcagatcatgaggtcaggcattcgagaccagcctgaccgacatggtgaaaccccgtctctactaaaaacacaaaaattagccgggaatggtggggcacacctgtaatcccagctactcaggaggctgaggcaggagaattgcttgaacctgggaggcggaggttgcagtgagctgagatcacactactgcactccagtctgggcgacagagggagactccatctcaaaaaaaaaaaaggtatgtaaggtaatgaatacgttaatcaacctgatttagcaattccacaatgtatacatatttccaagcttcatgtataccataaacatacacaattttaatacatataatatatgcaattgtacaccataaacatagacaacttttatttgtcaatttttaaaaatgtaagtttttaaagttattttggctgggcacggtggctcaggcctgtaatctcagcactttgggaggccgaggcaggtggatcacttgaggtcaggagttcaagaccagcctggccaacatggtgaaacctggtctctactaataaagaaaaattagctgggcacagtgtcatgtgcctgtaattccagctactctggaggctcacacaggggaatcacttgaacccgggaggcggaggttgcagtgagccaagatcatgccactgcactccagactgggcaatagagcgagactctgtctcaaaaagaaaaaaaatcaaatcaaataaagatattttgttaagctgggtatgatggggtacctgtagtcccagctgcttggaagactgaggcaggaggatcacttgagcccaggagttcaagttccgcctgggcaacagagcaagtcctcacctctataacaaacaaacaaacaaacaaacaaacaaacaacaaaataaagttttttaaaaagtgtttgctcactggcaatgcacaaggggctttaagtgtatcccaccttcatgctccacagagcttcacactttcccttcatccagaggacacctccagtggactggaccatcccttttccgtggttaaactaattcagcaagggactagggatgttttcatgaggagtttgggagcttgacgctggtggctgttgattgttctccaagctgtgtgggatcccatatccaaaatacatagcaaatcctagcagggaaatgagacaatgaaaggaaatgtagtcaccccttcccttataaatgccctatagcgattatactgtggtttgtttatttggaggttttcttgtttcttttatttagaaatagagcttcgctccattgcccaggctggagtgcagtggcatgatcatggctcactgcagcctcgacctcctgggttcaagcgatcctcccacctcagccttcagaatagatgtgactacaggcaggtgccaccgtgcctggctaatttttttttttttttttttttttttttgagacagcatctcactctgtcacccaggctggagtgcagtggcacaatctcagctcctgtcgcctgcgctggagtgcaatggcatgatctcggctcaccgcaaactctgcctcctgggttcaagcaattctcatgcctcagcctcctgagtaggtgggattacaggcgcccgccaccacgcccggctacttttttgtatttttagtagagatggggtttcaccatgttggccaggctgttcttgagctcctgatcttaggtgacccacctgccttggccccctgaagtgctgggattataggtgcgagccactgcgtgcggccagttttttattttggtagaggtggagtctcgccatgttgcccaggctggtctggagctcctggtctcaagcgatgctcctgccttcatctcctgagtagctgggactacaggcacaccccacactgttagcctgagacagctatagggaaaggtcgcaggaagagtgttgggctcagacacccaagaggcctctttttttccaggaagccactcaccaatcaacatccagactccacattgggcccaggtctcagtggtcatctgcatcatcaggtaaacatgtgcagagatgctgaccagaggagaacaggcaacagggggacctgcaggcaaagcgttaaccgtgagcacaccacgaacgtctgcaagggacccttattccaaggggtgggaaggcctcagctctgttgcagtcgcatattcaatgcctattcttttttttttttttttgagacagagtcttgctgtgtcacccaggctggagtgcagtggcgcgatctcagctgaatgcaacatccgcctcctgggttcaagcgattctcctgcctcagcctcctgagtagctgggattaccggcacacaccaccatgcccggctaatttttgtatttttagtagaaccggaatttcaccatgttggtcaggctggtcccgaactcctcgcctcaagtgatccacccgccttggcctcccaaagtgctgggattacaggtgtgagccacctcacctggctcaatgcctgttctgagtaggtattccattgggtgttctggaagagacaggttttgggaagtactgatatgtgggggctggagggggtgtccatgaacagtccattggtttttcgcaactgccctttttacccctggtcccgtagagtatttagagcttgaggcatgcagagtccactgactcaggagggtggtgtggggacataaggccacctaccttgaagtaaagaggagtgttgctctggggctgtctccagacggtgaaagtgaatcccacaatgagcaccagcagcaacacagccgctgcgatgtagatcagctctccagagaacaggcgtttgggccaatgggccaataccaggcatagcatggacagcaggacaactggaaaagggtcaaggttggggagaacaggttcaacttcagaagctaaataagtgaagatctcgggccacatcctatcccccaaaccatatatatgggtatgggtgtgtgtgtgtgtgtgtgtgtgtgtgtgtgtgtgtgtgtgtgtgccagcctcccaagtagggactacaggcacgtgtcagcacacccaaatactttttttttttttttgagatgcagtttcactcttgttgcccaggatggagtgcagtggcacaatcttggctcactgcaacctctgcctcctgggttcaagtgattctcctgcctcagcctcccaagtagctgggattacaggtaactgccaccacacccagctaattttttgtattttttttttttttttgagaaaaagtctttctctgttgcccaggctgaagtgcagtggcgtgatcttggctcactggaaactcggcctctccggttcaaataattctcctgcctcagtctccccgagtagctgggattacaggcgtctgccaccgtgctcggctaatttttgtatttttagtagagatggggtttcaccatgttggccaggctgatctcgaactcctgaccttgtgatccactcccccccggcacccggcctcccagagtgctgggattacaggcgtgagccactgtgcctgacctaattttttgtatttttagtagagatggggtttcaccatgttggccaggctggtctcaactcctcacctcaagtgatccacttgcctcagccttctaaagtgagccaccacacccagcctaaacttttaattttatatatatatatttgtgtgtgtatatgtatgtgtgtgtgtgtgtatatatgtgtgtgtgtgtgtatatatatatatggctttttgtttgttttttgagatgggatctcgccccattgcccagactacagtgcagtggtgtggtcttgattcactgaagcctcgactgcccaggctcaagcagttgtcccgcctcagcctcccaaagtgctgggattccatgtgtaatccactgtgcccggccaaaagtgcgcctactaagaagggccaccacatcttcacaactcctctcaactaccaaagccccacactccctactcggccccctgccgcatgctatcaggttcaaaacaccccgcggagaaacgccactgctcaccaagcagaaaggcacatccatagacgatgcggccccatctcggggtggggatggtgctgacagggctccacagactcgccggagtgctggacgcttcaggaacacatgctggggattctgctttgggtacagaattcatctcaactacttcctccttcggcttctcgttcttgctgaaattctcgtctggctggtacctgaattagagagagtagggcaagattaacccaggtccctgttcatccaacatcagagagcctaatacacccacggtagctcccacgtatctgaggtttcatctacccgtatccactacagtccaaaaatagtaaatggaaaagtccagcagtaatttgtaagttttctttctttttttcctttttttcttttctttctttttttttttttttgagacggagtctcactctgtcacccaggctggattgcagtggcacaatctcagctcactgcaaccacccccgcctcccaggttcaagcaatctcctgcctcggcctcctgagtagctgggattacaggagaccaccaccacgcccagctaatttttctatttttaggacataccaggtttcaccatgttggccaggctggtctcaaactcctgacctcaagtgagccacctgtctcggcctcccaaagttctgggattacaggcgtgagccaccgcgccccgccgtaattgataagttttcaattgtgtgcagcttcaagtagcggcattccacgctgcccatgcccaggatgtaaatcatccttttgtccagtgtgtccatgctgtgaacgctaccggccgtgttaagtcacattaggcaactgagttatggatgggaaaatgatcatgtatagggactggtactatccgcggtttcgggcatgtactgggggtcttggaacgtgtcccccgtggataagcaggggctgttgtactcctcccactcctgtatgtgtagcaatgcaccgaggggccaggaggcaggcagaagagggctgggaaccccatcaatcctcacgtgtctaggaccccagtctcacctgaggacaagaacagaaaaagccaccaaggagtaagcaagcatagtcccgatggacaagaggctcacaaggtcactgaactcaaacaggaaagccatgattgctatagtcagggctcaaaacagggtgagttccaatgttccacagcactagagggtgactgtcgttaacaacttataagagctggaaaagcactttggaaggctaaggtgagcggatcacctgaggtcaggagttcaagaccaccctggccaacatggtgaaacgtcatctctactaaaaatacaaaaattagctgggtgtggtagcacatgcctgtaatcccagctactccggaggctgaggcaggagaatcgcgtggacctgggaggcggaggttgcagtgagctgagatcgtgccactgcactgcagcctgggctacagagcgagactctgtctccaaaaaaaaaaaaaaagagctggaaaaataggttttcagtgttcccaatgcaaggaaataatcaatgtttgaagtgatggttatgatattaccttgatttgattattacatcttgtatacatgtatggaaatatcacactgtaccccacgaatatgtacaattattgtgttaattaataataggaatgtggccaggtgcaggggctcatgcctgtaatctcagcacttagggaggccgaggcaggcggactgcttgagcccagaggttccacatcagcctgggcaacacagacccccgcctctacaaaatttgaatattagccaggtgtggtgccactgtacactggcatgggtaagagtgagatcctgtctcaacaacaacaaaagtcagattatgtacattttctttaattttttttttttaaacaggaatcatcatacctccctgcagccctaacctgctgcgctcaagccatcctcccacctcagcctcccgagtagctgggactacaggtgtaccaccacacccagctaatttttttttttttttttgagacggagtctcgctctgtcgctcaggctggagggcagtggcgcgatcttagctcacagcaagctccgcctcccacagccaactaattgttaaaaatttttttgcagagacaaaaaaatgatctcagggtctggctatgttgcccaggctggtctcaaactcctgggctcaagtgattctgccttggcctcccaaagtacgggggttacaggcatcaggcactgcaccccgccccattttctatattgtattgtattgtatttattttaattattttattttattttgagacagggtcttgctttgtcacccaggctggcgtgcagtggtgtgacctcagctcactgaagcctcaacctcctgggctcaagcaatcctcccacttgagcctccccagtagctgggactacaggcacgttccagcatgcctggctaactttttttttaatttttgttgagatggaagtctccctgtgttgcccagggtggtcttgaactcctgggatcaagcaatcctcccacctcagcctcccaaagtgctggggttataggcgtgagccactgagcctagtcccattttcctgttaaactttttattaaataaacttttgtaatagccaactttttaaaaaaattgatgaataataataaaagcaaaaatggatgggctgtgggggaggatgaggaactaactcatagaaaatggatgaaagaaagcctggattctgggcctttacctgcaagggtcccagcaacgacagtggccaccacaggggtgctggtgtgggcgtggatccgggcgagtccgcagaaaaggagcctgtcctcagccattgactagagcacgcgaggcgtggggaacgtggcacccaggaggctgcatgcaggagaaaacgggaacacgcatggggactcaggaagcaagagggactggggcttctgctctgtcgcctccgtgggtgaaacgtctcctccctttaccaaggcccaggacacccgagaaccagacagcagacagggagagagcatccagcactgacctggaggaaagggcacagagggtgccgacggccacagcatatctgatgggggcccatccaatgtggacaaaagcctccggcaaggggttctcgggacatatcaggtagtaggggcactatgagggtgagcgccgctgagacaccaaaataggccaagaagcagatgaagatcgaggtcacagtgcccaaggggatggagcggtgagggtggaggcggtgagggtggagggcttcttctcctgcgggacaggtatatgcaccgggcggtgagggtggagggcttcttctcctgcgggacaggtatatgcaccgggcggtgagggtggagggcttcttctcctgcaggacaggtatacgcactgggccaggaaaatgcacggaagtgaaggtacaaaaccctcttccctcttccccatctgagaacagggtagcctttaatgaaacctgtgcccagcggcagcccaaacagtgcccaaacccccgatgagacagaatgaccgtgttacctgtggtggcaatgccatcaaaacccacaaatgcaaagaaacacgtggccgctccatggagaatcacgccaaagccaaaaggcacaaaccctccagagcccagggagcccgagctacggggacagaaggaacaagaaacattggtaaggtgtgcagccgtctttctgggacgactcagttaactccaactgctcagttaattccacaagcccggggcccccactgccatccccactccccatcatctggctccgtcaacccagattccccctattcccacaatagtccaggttctgcaccccaggccccactcctgtgtccaagagggcacctctggccagttgcaatggctcacgcctataatcccagcactttgggaggctgagtcaggtggatcacttgagcccagaggttgagaccagcctgggcaacatggcaaaaccccatctctacaaaaatttaaaaacttagctaggtgtggtggtgcacacctctagtcctagctactctagatgattgcttgagcctgggaggtagaggctgcagtgagccatgatcgtgctactgcactccagcctgagggacagagcaagaccctgtttcaaaaaataaaaataagttttaggctgggagcagtgagtggttcacacctgtaatcccagcactttgagaggccaaggtgggcagatcacctgaggtcaggagtttgagaccagcctggccaacatggtgaaaccccgtctctaccaaaaaaaaaaaaaaaccaaattggccgggtgtggtggcacgcacctgtaatcccaggtggctgaagcaggagaatcgcttgaacccgggaggcagaggttgcagtgagctgaaattgtgcgaccgaaatttggcctgggcgacagagtgagactccatctcaaaaaataaaaataaaggtaaatttgaaaataaaaaaacaggccaggcacagtgggtcacacctgaaatcctagcactttgggagtcagaggtggacagatcaatggaggtcaggagttcgagaccagcctggccaacgtggtaaaaccccatctctattaaaaatacaaaaattagccgagcatggtggcaggtacctgtaatcccagctactcggaggctgaggcaggagaatcgcttgaacccgggaggcagaggttgcatgagccgagatcgtgccactgcactccagcctgggtgacagagtgagactccatctcaaaaaaaaaaagtaaataaataaataaataaaaataaataaaaattaaaattaaaattaaaaaataaaaaaaaataaaataaacctgtgccctcacctgtgggtgtcgttggaccaccccagctcggcccatttgtagtcggcgtctgtgagctgccagttgtgcagatctcccttgatgaagccggagaagatgacgcagctcagaaccaaaaggttcacacctgtgaagactttggaaccccaggctgactcccgagctcccagagccagcagtcctgtgggaaacatggaatatccagaataaataaacccacagagacagaaggcagatccgtggttgccaggagccaaagggaatggggaacgaccgcctaaagggtgcagggtttcccgcaggggtgatgaaaacgtttcccaattagatggaagtggcagctgcacaatgccgtggatgtactaaatgccactgaactgcatgctttcaaatggttcatttcaggccaggcgcagtggctcacgcctgtaatcccagcactctgggaggctgaggcgggcggatcacgaggtaaggagattgagaccatcctggctaacatggtgaaaccctgtatctactaaaaatacacagaaaaattagccgggcatggtggcgggcgcctgtagtcccagctactcgggaggctgaggcaggagaatggtgtgaagctgggaggcagaggttgcagtgagccaagatcgcgccactgcactccagcctgggcggacagagtgagactccgtcaaaaaaaaaaaaaaaaaaaaaggaaagaaaagaaagaaagagaaagaaagaaagaaagcgagaaagaaaagaaagaccttacaattcatttggaaacaaaaagagctcaaatagcaaaaggaatcctgaacaaaaagaataaagctggagacatcatgttacctgacttcaaaacatatcagaaggctctggtaaccaaaacaacatggtattggtataaaaacagacatatggctgggtattgtggctcacacctgtaatcccagcactttgggaggccaagaggggcagatcccttgagctcaggagttcaagaccagcctgggcaacatggtgaaaccccatctctacaaaaaatacaaaaattagctgcgcatggtggcaggcgcctataatcggagctacccaggaggctgaggcaggagaagcgcttgaacctgaagactgaggctgctgtgagccaagaccacaccactgtactttagcctgggcgacagagcgagactcggtctcaaaaaaaaaaaaaaaaaaaaaaaaaaaaaaacaaccaaaccagaaacaaaaaaaaccccaaacatatagagcaatggtacagtatagaaaatccagaaataaatccacgtgtgtaccggctggccaccgtggctcactcctgtaatcccagcactttgaaaggccgaagtgggcagatcacctgagatcaggggttctagaccagcctgaccaacatggcaaaaccccgtctctactaaaaatccaaaaattggctgggcataatcccagcactttgggaggccaaggcgggcaggtcacctgaagtcaggagtttgggaccagcctggccaacatggtgaaaccctgtctctactaaaaatacaaaaattagctggacgtggtggcacacacctatagtcccaggtacttgggaggctgaggaaggagaattgcttgaacccgggaggtggaggttgtggtgggctgacatcatgccactgcactccagcctgggcaacagagcaagactccatctcaaaaaataaaaataaaaataagccaggggtggtgcccacacctgtaatcccagctacttgggaggctgagtgaggagaatcacttgaacctgggaggcagaggttgccgtgagccgagattgggccactgcactccagcctgggtgacaagagcaaaactgtgtctcaaaaaaaaaaaaaaaaattaggcgggtgtggtggcatttatgcctgtaatcccagctactcaggaggctgagccaggagaattgcttgaaactgggtggcagaggttgcagtgagcagagatcacaccattgcactccagcctgggcgacagagcaagactctgtctcgaaaaaagaaaaaagaagaaggaaaaagaaatgatccatgggtgaggggttggatatcctagatgccgtgacatgatgatcattacctactccattcatgtatcaaaatatcacgtgccccattaatatgtacaattattatgtatcaaataagaaaaaagttcccttcattggctgttttaattttataccaccctaagtgaaatattgccacttagaaagcttagctgcaggtttagtaaattatagtgaagaaacacacctgaagctggagctctgccgggggcaggtgcaagggctgatgtggagtcccagcttgtccaaccagcggcccataggctgcctgcagctcaggatggctttgaatgtggtcccacacaaattcagaaactttcttaaaacattacgagtttgtttgtgattctgggtttttttcagcccatcagctatcgttagtgtattttatgtgtacccggagacaattcttcttcttccaatgtggcccagggaagccaaaagattggacaccactgattgtagacaaataaggaggccaccttcagacagagcactgtacgctgttttgttcttgtttttctttgagatggagtctcgctctgtctcccaggctggagtgcagtgggaccatctcggctcaatgaaacctccgcctcccaggttcaaacgattctcctccctcagcctccaagtagctgggattacaggcaaccaacaccatgcctgaccaatttttgtatttttagtagagacaaggtttcaccatgttggccaggctggtctcaaactcctgacctcaggtgatccaactgcctcggcctctgaaagcactgggattacaggcgcgagccacagagcccagccacaaagtgaccttctaaaaaaaacaaaaaatcctttttgcaagacaaaaagtgctctcatgataatttttttaaatttttttttgagacatggtctcgctgtgtcactcaggctggagtgcagcaggctcaaggcatcctcccacttgagcctcctgagtagctgggactatagtcccacattaccacacccagataatttttgtatttttggtacagatggggttttgccatgttgcctacactggtcttggactcctgggctgaagtgatccacccgcctcagcctcccaaagttctgggattataggcacgagcctccgcgcctggccctaatatttatggtggaaataaggagatgattgcggtacgatttcatgccttccacagtttattgacataaaaagagatttttaaaaaaaacattgacaatgcttaaggaggagaagaataacacgaacacacttcatagaatgcactctgtaggcaaagtacgttaaccgaatagtgagtgagttccaaatttttaaagtcctgttgctcacaggatggaggaaggactatgtgaaaagtaaagtctaattcaaatttgaggtgaactggctgggcgcagtggctcacgcctggaatcccagcactctggaaggccgaggcaggtggatcacctgaggtcaggagtttgagaccagcctgaccaatatggtgaaaacccgtctctgttaaaaatacaaaaattagccgggcatggtggtgggcgcctgtaatcccagctactcgggaggctgagacaggagaattgcttgaatccgggaggtggaggttgccgtgagccgagatcgtgccactgcactctagcctgggtgacagagcgagactccacctcaaaaaaaaaagtaagctgggtggtgcagtggctcacgcctgtaaaacactaacacattggggggccaaggcaggagaatcgcttgagcccaggaattcaagaccagcctgagaaacataggaagaccccatctctacaaaaaatttaaaaatgagtgggcatggtggcatacacctgtagtcccagctagttaggaggctgagacaggagggtggcttgaacccaggaggttgaggttgcagtgagctatgatcctaccactgcctggacaacagagtgaaaccggtctcaaaaacaaaacacaaaaaagcagacagcagcatagaaataggattggacgtggccgggtgcagtggctcacgcctgtaatcccagctctttgggaggccgaggcaggtggatcacttgaggtcaggcgttcgagaccagcctggccaacatggtgaaacctcgtctctatgaaaaatacaaaaattagccggccatgctggcaggcgcctgtaatcctagctaattgggaggccgggacaggagaatggcttgaacccgggaggcggaggttgcagtgagctgagattgtgccacggcattccagcctgggcaacagagtgagactcggtctcaaaaagaaaaaaagaaaaaaaagaccccctctctatgttaaagaatatttttaaaaaaggaagaaagaaaagaaataggattggacaaaatggatctgatctaaaggtcatagactgcaggggtcgggcggacggggaacccagcaaacctgtctctctgcattcctcctggcctctctgagcagccttccctcctgctgggcagagggcagaagcctctctggaatgagggtcatagacctaaaaccaaacaagataggacaggaattcctttatggtcagtgtttacagggaagatggagggaaaattagagtcagagattttaggttttatggcaggatttggggaaaagggattctggtgtctatggctcactttgggaaagacagtttctagtttctatggctagccttgggggagaaggagggtcaggaagaaacttccgcttctgaagctgcttcggaagcctttgttttgaggttatcggtttctgagccccaatattagcctgccacagtctaagctttcaaagcgcctgtcaaactcttgtggatctatgtatttcaaagaccaaaatcaacagctcacatatggggtccaagaggaggggggaggtcactgcacgttgtcacgtgtgagatctttgttgttgttgttgagatggaatctcgctctgtcacccaggctggagtgcagtggcaccatctcagctcgactgtaaccttcacctcccaggttctagcaattatcctgcctcagcctcccaagtatctggaattacgggtgcgtgccatcatgccccgctaattttttttttttttttgtatttttagtagagacgggggtttcaccatgttggccaggccagtctcaaactcctgaccccaagggatctgcccacctcggcctcccaaagtgctgggactacaggcatgagccaccgcgcctggcctcttgtgagatctgataagaagtcacgcactagaaggaagggaagagtgtactccacaaccccaaacgatgcgtttggaatcatttcaaacccacataacaagagtttcatacggaattgggacagaacatggcccctaatgagcccccctaaataattctcaaggaccacttctccaatgacgaaggagattgaggatttttttttcctacgtttattggccgtgtggatattttgcctttgtaaaatatgtgtccaagccttttgcccatttctccagtgggtagtatttcctttgttttttttttttgagacaaagtctcactctgttgcccaggctggagtgcagtggcctgatctcggctcactgcaaaccctgcctcctgggttcatgccagtcttctgcctcagcctcccaagtgctgggactacaggtgcacaccaccacgccctgctaattttttgtatttttagtagagatggggtttcaccatgttagctaggatggtctcaatttcctgacctcgtaatctgcccgcctcggcctcccaaagtgctgggattacaggcgtgagccactgcacctggcctaaaagaatctttaaattgtccatgagcgatggtgcgtgcctgtggtcccagctacttggaggctgagaaggaaggatcccttgagcctgggagtttgaggcagcaatgagctatgctcttaccactgcactccagcctgggtgaaagaggaagaagacccttaataggcggaccacggtggctcacgcctgtaatctcaatactttcagaggcctaggtggaagaattacttgagaccaggagttcaagaccaacctgggcaacatagcgagaccctcatctctccaaaagtttgaaaaagaaaaaaaaaatttttaatgaaacagaagtcgttaattttattttattttctaagacatcttgttatagcaaaaagtccttaattttaatatagtctaatttatatattttcttcattgtaaaaatttttgggtcctatctagcaaatgttagcttacctctatgtaataaagacattcttctgtgttgtcttctaaaacaaaacattgttttattttctgattttaggtctgcagttcatttgtagatttttgtgtctaggattaggtagggttaagatcatttgtggccaggcatggtggctcacaccagtaatcctaacactttgggaggctaaggcaggaggatctcttgagcccaggagtttcagaccagcctggggaacatagaaagaccctgtctctctattttttttttcagttaaatatatacttttaaaaagatcatttgtggtgctatagttgtgggtgtttaatttgtaatttactttgttctgttgatctatctaattttttttttagacggattcttcctctgtcacccaggctggagtgcttcagcctctcaatgccatcatgcccagctaattttttggacttgtagtagagacagagtttcaccatattgaccaggctggtctcgaactcctggccttaggtgacccgcccacctcagcctcccaaaatgctgggattataggcatgagctactgtgtccagccagatctgtctaatttttttttttctttgagacgcagtctcactctgtcactcaggctggagtgcagtggcgtgatcttggctcaatgtaacctccacctcctgggttcaagtgattttcctacctcagcctcctgagtagctgggattacaggtgcgtgccaccacgcctggctaatttttgtatttttagcagagacggggttttgccatgttggccaggctggtctcaaactcctgacttccagtgatccgcccaccttggcctcccaaaatgctaggattacaggtgcgagccactgtgcctggcccagagctgtctaattttaaagaatgtatgaagattcagatttaggttcctgctattatgttatgggaaatcttttcctagtttcttctgattaatataaatccttaattttatttttatttatttttttactacagtcctcttttattactttttatttttcttaattttaatataatgaaaagttcgatttttcctgttatggttagcatttttttcttctgtttaagaggtgtttcctggctgggtgtggtggctcacacctgcaatcctagcactttgggaggccaaggtgggaggatcacttgaacccaggagttcaagaccagcttgggcaacatagtgaaacccttgtctccaatttttttaaattaaaaattaaaaaaggcggggctgggtgtggtggctcacccctgtaatcccagcactttgggacgccgaggcgggtggatcacctaaggtcagcagttcgagaccagcctgaccaacatggagaaaccctgtctctactaaaagtacaaaattagctgggcgtggtggtgcatgtctgtaatcccagctattcgggaggctgaggcaggagaatcgcttgaatccaggaggcggaggttgcagtgacccgagattgcgccattgcactccagcctgggcaacaagagtgaaactctgtctcaaaaaaaataaataaataaaaaataaaataaaaaagaagtgtttccctagcgtgaagacatgaagctcttctgtaaacttcattgttctgcctttacaattcaatctacaacccactagaattaatcttccgtatatatagcatggggtggaggtcaaacaccttttttccatatggatgttcagctgtcccagtgtcatttatttaaaagactgtactggacctggcatggtggctcacgcctgtaatcccagcactttgggaggctgaggcgggtggatcacttgaggtcaggagttcgagaccagcctaaccaacatggcaaaaccccatctctgctaaaaatacaaaattagccaggtttggtggtgcatgcctgtaattccggctacttgggaaactgaggcgggagaatcccttgaacctcataggcagaggttgcaatgagccaagatcgcaccattgcattccagcctgggcaacaagagcgaaactctgtctcaaaaaataagaaaaaatagaggccgagaatggcccttgctgccaccaacatggagactttgtaccgtgtcccgttcttagcgcttgaatgtcccaacctgaagctgaagaagccgccctggctgcacatgccgttggccatgactatgtatgctctggtggtggtgtcttacttcctcatcaccagaggaatcgtttatgatgttacggttgaaccgccaggtgttggctctatgactgatgaacaagggcatcagaggccagtagctttcttggcctacagagtaagtggacaatattattatggaaggacttggatccagcttcctgtttacaatgggaggtttaggtttcataatcctggaccgatcgaatgcaccaaatatcccaaaactcaatagatttcttcttctattcgttggattcgtctgtgtcctattgagtttttttcacggctagagtattcgtgagaatgaaactaccgggctctctgatgggttagagtgcctttaagaagaaatcaggctgggtgcagtggctcacgcctgtaatcccagcactttgggaggccgaggcgagcggattatctgaggtcaggagttcgagatcagcctgggcaacatggtaaaaccccatccctactacaaatacaaaattagccaggcgtggtgacacatgtctgtaatcccagctactcgggaggctgaggcaggagaattgcttgaacccgggaggcagaggatgcggtgagccgagatcgcaccattgcactccagcctggacaacaagagtaaatctccgtctcaccaaaaaaaaaaaaaagaaaaaaaaaaagaaatcagtgcatactggatttgctcctgtcaatgaagttttaaaggctgtccaatcctctaatatgagatgtagaaaagaaggaagagcagcagtaaaagaaatatctagtgaaaaaccaggaagtgtattgaagcttggactagaatttcttctttattaaagagacaaatttatcacagtattttcttttcctgctgaccacattgctataccaatgatgatgagtggcattttcttcttagttttttatttctttaagaaaatacaagccaggcgcggtggctcacttctgtagtcccagcactttgggaggccaaggtgggcagatcacgaggtcaggagttccagaccagcctggccaccatgttgaaaccccatctctactaaaaatacaaaaattagccgggcgtggtggtggcggggcacctgtaatcccagctacttggaaggctgaggcaggagaatcacgtgaacctgggaggcggaggctgcagtgagcctagatcgctgccactgcactccagcctgggcgacagagcgagactctgtttcaaaaaaaaaaaaagaaagaaagaaagaaaagaaaatatactgcatacctacaactataatagcaaatatagtgattattttttacaacccccttaacactttttggagatgacatttctgactttcagaaattaacataaaatcaagaagcaagattccatgagctgagaactctggacagctggtcagctttacctacggagctttggctttaactagagtgtgtgatggtagattatttcagataggtatgtaagactgctgcctgaacaataacatgtatgaaaggaacagaaataaatactaattaaaaaacaaaataagaaaaaataaaaaataaacactactatggacatggtagctcatgcctgtaatcctagcactttgggatgccaaggtgggtggatcgcttgaaccaaggagttcaaggagttgggagaccagtctgggcaacatagcaagaccccatctctaaaaaaaaaaaaaaaaaaagagtactaaagactcagagatagaaaaatggaaattattcatattgtctccagatttttttttttttggacggagacttgctctgtcacccaggctggagtgcagtggcactatcttggctcactgcaacctccacctcccaggttcaagcaattctcctgcctcagcctcccaagtagctgggattacaggcatacgccaccaaacccggctaattttgtacttttagcagagacagggttttgccatgtttgtcaggctggtcttgaacccctgacctcaggtgatccacccgcctcggcctcccaaagtgctgggattacaggtgtgagccaccgcgcccagccagtagtcttttatccttgtaacagattaatcttttctagggaaatggagacctttcattttcatgtcctttttacatccctgttgattgtatctctgcctccattctgttgatcggaatgacactaacttaatttgggttctctaaagcagacactgatacaaaggcttcagttccagaggtttatttagaatgtgatcctaaaccaagagggaggtagcagggagagtaagacaggaaaggatggggagccaacaccttatctaaggacatgttgaggccaggcgtggtggctcatgcctgtaatcccagcactttgggaatccgaggcgagcagatcacaaggtcgggagtttgagaccagcctggccaacatagtgaaactctgtctctactaaaaatgcagaaaacaggccgggtgcggtggctcacgcctgtaatcctagcactttgtgaggccgagacgggcggatcacctgaggttgggagttagagaccagcctgagcaacatggagaaaccctgtctctactaaaaatacaaaaattagccttgcgtggtggtgcatgcttgtaatcccagctacttgggaggctgaggcaggagaatcacttgaacctgggaggcggaggttgcgatgagccgagatcgtgccattgcactccagcctgggcgacaagagtgaaacttcatctcaaaaaaaaaaaaaacaaaaaacagaaaaaattagctgggcctggtggcagacgcctgtggtcctagctactcaggaggcaaaggcaggagaattgcttgaacctgggaggtggagattgcagtgagccgagatcatgccactgcactccagcctgggtgacagagtgagactctatctcaaaaaaaaaaaaaaaaaaggataagttgctgaagtctgtgaagtggacaatgagggcttgattcctttgaagcctgttgaagactgtttacgcttcctcttatcatcccctgcctcatcccctgtcacagagatgaaagactgggacatttctgtgccaaatttcatcccacattgggtgaggctttccctgagacatgttgacttcctgcagttcaaagctactttcttctttagacagggtctcgctctgtcccccaggctagagtgctatagcgtgatctcgcctcactgcaagctccgcctcccgggttcaagccattctcctgcctcagcctccccagtagctgggactacaggcacctgccaccttgcccggctgtttttttgtatttttagtagagacagggtttcaccatgttagccaggatggtctcgatctcctgacctcatgatccgcccaccttggcctcccaaagtgctgacattacaggtgtgagccaccgtacccggcctattttcttctttagacagggtcttcctctgtcccctaggctggagtgcagtggtgtgatcttggctcactgcaacctctgccccctgggttcaagagattctcctgcctcagcctcctgagcagctgggattacagacatgcgtcactatgcccggctaattttttgcattttttggtagagatggggtttcaccatgttggtcaggctggtctcgaactcctggcctcaagtgatctgtctgccttggcctcccaaagtgctgggattacaggtgtgagccaccccgcccggggcaaagctattttccattttaaattttttgttattgttgttttgagaccaagtctcactctgttgcccaggctggagtgcagtggcatgatctctaaattttgtatttttagtagagacgggttttcaccttgttgcccaggctggtctcgaattcctgacctcaggtgatccacttgcctcagccgcccaaagtgctgggattacaggcgtgggccaccatgcccagcctgccaaagctattttctatgggataaatgacagcagaaaggaccccagagcaaaatactacaaagatgtatggcacgtgcatgaggtgagagtatggtagaatcaagtgagtctctgctttcatgagactgaacagtgaggctcaggttaaaattagaggtgtacaagagagtatgatatggacatctgctactgaacaatccttgtgcttcttgaaaatgctcatttccatattttttattttttattttttttcagatacaaggtctcactgtgtcacccaggctagattgcaggggcacaattaaggttcactaaagtcccaaccccccgggttcaagcaatcctcctgcctcagcctctggagtagctgggactgcagttgcatgccacagtgcccggctaatttttttattttttgtagaggcaagggcttgctctgttgcccagattggtcttgaactcctggcctcaaatgatcctcccacccgtgcctcccaaagtgctgggattacaggcataagccactgcacccagcctcatttctatatgtaagttcatttagtcattaagtcttgaagcaaagatccagccacgatctatataaaattttcaatacaggccaggcatggtggctcacgtctataatcccggcactttgggaggctgaggcagactgatcactttaggtcaggagttccagaccagcctggccaacatggtgaaacgctaatacaaaaaattagctgggcatggtggtcagcacctgtaatcccagctgctagggaggttgaggcaggagaatcggttgaacctggaggtagaggttgcagtaagtcaagatcacgccactgcactccaccctgggaaacagagcaagactctgttccaaaaaaaaacaaaaggcaatctttcctagaaaaaaatagtttctgcacattcttaggcacgcatttgtaggctgctatagctatttaaaattttcaatacaatatgtttaccagagcaaactacaatcctcattgttatgtgggccccaaaccattactgatactcatctgtttcccccacgtcgtctacatttcctcatggtgggccagtacttcattttttgtaactcatttgcctgctagggtgactcaggcctttgtttctgagagatctgagtctggtgttgctaggaaggaaaaggttaactagtctataatccattctttctcccaacctggtgatgtctgaggaggcatcccttggtcaaacttctttgtaaacatgctaatcagatctcatggtatttattagaggaaaacaaccagagattcttatctgtgagatgctttcagcaggacatacttgttctttcttgatgtcttgcagtaaacaaggaatttaggggtttatgggcatgagccactggaaaatgtcagcgtcacatatttagttaagagagagagagagaggggctgggcgtggtggttcatgcctacaatcccagcattttgggagactgaggcaggaagatcacttgagcccagaagcgtaagatcagcctaggtaacataatgagacctcgtcttattaagagtctgattctaccctcccttggtgttatctcagttactgtacttttacagggctgtggttgtgcaacttcctgctgggcatggggaattctctgagttccagacaagaaccttcctgcccaatatgcagcagcaacccagtctcttcataatgctcgtggttgattatccatgcccgccaactacctcatttctctgcccagtgctttatcagcctgaagagcccacagtcaccaggcagaaaaccttactgtgcttcttggtgaaagtgttccctcttcaaaaatgaagacatcacgccagataaggtttggggactagaagcacaatttcttcaagtgggtccctagacaggatattgataaatgccaattctgtttcactccctggtagctacacctgtatattctaactactagggtcacagccccttatattgactgttggttatatgcagatattgcatcttagaggacagcaccccaaacccatgggatgttatacctgggctgacactttagttgagccctttaaaaagccattcctgggccaagcccggtggctcacacctgtaatcccagcactttgggaggctgaggcgggcggatcacgaggtcaggagatcgagaccatcctggctaacatggtggaaccctgtatctaccaaaaatacaaaaaaaattagctgggcctggtggcaggcgcctgtagtcccagctattcagaaggctgaggcaggagaatggcgtgaacccaggaggtggaggttgcagtgagctgagactgtgccactgcactccagcctgggcgacagagtgagactctgtctcaaaaaaataaataaataaataaataaataaataaataaaaggccattcctggctgggcatggtggctcacgcctgtaatcccagcactttgggaggccgaggagggcggatcacctgaggttgggagtttgagaccagcctgaccaacatggagaaaccctatttctactaaaaatacaaaattagcctggcatggtggcacatgcctataatcccagctacttgggaggctgaggaaggagaatcgcttgaatccgggaggcagaggttgcagtgagcagagattgcaccattgcactccaacctgggcaacgagagtgaaactccatctcaaaaaaaacaaaaagccattcctggcctggcgcaatggctcacgcctgtaatcccaacactttgggattacgcttgccaaagtaagtgaattacctgaggtcaggagtttgacaccagcctggccaacatggtgaaaccccgtctctactaaaaatacacaattagctggacatgatggcaggcgcctgtaatcccagttactcaggaggctgagggaggagaacctcttgaacccaggaggcaggggttgcagtgagccaagattgcgccattgcactccagccagggcaacaagagtgaaactccgtctcaaaaaataaataaataaataaataaataataaccattatgttatcccatgatggcagctctttctgtataaggtaataaatatgcgatgtaaagagtgtatttcatattaatgcactgattgttgtaccttttttttttttttttttttttttttgagacagggtcttgctctgtcacccaggctggagtgcagtggcgcaatctcgactcacttcaacctctgcctcccaggttcaagcaatccttctgcctcagcctcctgagtagctgggatcacaggtgcccgccaccacgcccagctaatttttgtacttttttagtagagacggggttttgcctgttgcccaggctggtctcaaactcctgacctcaggtgatctgccctccctggcctcccaaagggctgggattacaggcacagggagccaccatgcccagctgtttttttgttttgttttttgttttttttgagacagagtctcactctgtcgcccaggctagagtgcagtggcttgatcttggctcactgcaacctcggttcactgaagcctcccagtttcaagccgtactcttacctcagccttctgagtagttgggattacaggcgtgagccactgtgcccagccttttgttttgtatttttagtagagatggggtttcaccatgttggccaggctggtcttgaactcctggccacaagtgatccacctgccttggcctcccaaagtgctgggattacaaggatgttagaaaatggctgggcctggtggcttacacctactcgggaaactgaggcacgagaatcgcttgaacccgggagacgggcattgcagtgagctgagatcaggccattgcactccagcctgggcgacagtcacaaaaaaaaaaaaaaagaaagaaagaaagaaagaaaacacatcaattccaggaaatacaaatcagatgagatcgggcgtgttcccggtggtatggtcacagaaacaggaagcacaaatcaatcacctccaccactgccctctccgggggaaaggatgaaatgtaatcaacttaccactaactagtcagtcattccccttaaaggacaatagcagatcaaggtgtcatcatgggcttttttttttttttttttgagacagggtctcgctctgtcgcccagcctagagtgcagtggcaccaccatagctcaaccttctgggctcaagcgatcctcctgccttagcctctggagtactaggactataggtgcatgcctccatgcctggctaattgaaaaattttttttgtagagacaggatttggcttttttacccagactcatctcaaactcctggcctcaagcgatcctcccgcctcggcctctcactggtactcttatcacaggcatgagccagcgtgtctggccctgatcacagccagaaactcccaggctgtgataatgagctcagctttcatgagagacagctcatgctattaggcacatccttcgtctcttctcctgctaccctgctaccgcgtctctgttcatgggtgcattatacaagcagtggtctgaggatagagcctcagtgatgcccactgcacaaggcaccctctcttcctggttgctcaggatcttctctgtggtgagcactccctggagaacattaacatgagacacagagatctcatgcctctgcctcttctcataattccttttttttttttgagagggagtctcaccgtgttgcccaggctggagggcaatggtgtgatctcagctcactgcaaccttcaccttccaggttcaagtgattctcctgcctcagcctcccaggtagctggggctacaagtgtgtgtcaccgcacccggctaatttttgtgtctttagtagagacggggtttcaccatgttggccaggctggtctggaactcctgacctcaggtgatctgcctgcctcagcctcccatagtgctgggattacaggtgtgagccactgtgcccagtgcccccccttttttgtgtgtgtcagggtctcactctgtcacccaggctagagtgcaggggcataatctcggctcactgcaacatctgcctccaaggctcaagtggtcctcccacctcagcctcctgagtaacagggactacaggcacgtgccaccaaacccagctaattttttgtatttttggtacagacgagacttcaccatgttgcccaggctggtcacaaactcctgacctcaagcgatccaccagccttggcttcccaaaatgctgggaatacagacgtgagccaccgtgactggccccagctaatttttgtatttttagtagagatgggttttcaccatgttggctaggctggtctcacactcctcacctcaggtgatccacctgcctctgcctcccacagtgctgggattacaggcataagccaccacgccccaccgtgagacccccatctctacaaaaaaagttttaattagctgtgcatggtggcaggcaccctagtcccagctacctactgaggaggctgatcgcttgagcccaggaggtcaaggctgcagtgagctgggatcacagcactgcactccagcctgggagacagagggagactctatctccaaaaagaaaaaaagactagagattgtgccccaggcacagatcatattaatcccagtgatattctgggagtggtggccagactccttcccaggactggtcttccggtttggcaatgagtgttagtcaaggcgtgaggttctcatgggccgtctcaagcactctgttcgacatctttttactctctcccaggctggggtgcagtggcgtcatcttggcttactgtagcctccgcctccagggttcaagcaattctggtgcctcagcctcccgagtagctgggattataggcgcctgccatcacgcctggctaattttttttgtatttctagtagagtcagggtttcactatgttgcccaggctggtcttgaactcctgacctcaggtgatctgcctgcctcgacctcccaaagtgctggggttgactgctcgtggcccctctgttgcacatcttgacttctcagcctccaaggtgattctttaggacaccaatttaatccctctaaacatggcaacagagccagcggtttccagccctatttgcgcagtagaaggattatttacaaatcctcgtacttagactccacccgcagagattcaagtggactgagcctggagtgaagccgaaggcattttcttataatcctgagaatgataatatacagctgtctttgaaaaccaccactaagacttgtaaactttgttcattcaagtcttcttttctccccttaaaagcaggcttatccttgaggtgtgctttttcagactccagtaagcatcactgagaacacttaattaatatactgaggcctctcacaagagggaaggagtggaagaactcctggagaaggacttggaagggagagatgtttttctttctttctttcttttttttttttttggagacagagttcactcttattgcccaggctggagtgcaatggcgtgatcttggctcactgcaacctctgcctcccaggttcaagcaattctcctgcctcagcctccccagtagctgggatcacaggcgcctaccaccatgcccagctaatttttgtacttttttagcagagacgggctgtcgccacgttggcctggctggtctcgaactcctgacctcaggtgatccgcccacctcggcctcccaaagtgctgggagtacagacatgagccaccgtgcccagccaagatgtttttcttaacacaaaaagtttttgtctgggtgtggtggctcacgcctgtactcccagcactttgggaggccgaggcggggagatcacttgcaatcaggagttcgagaccagcctggccaacgtggcaaatacaaaaattacctgggcatggtggcgcttgcctgtaatcccagttatttaggaggctgaggcaggagaattgcttgaatccgggaggcggaggttgcagtgagctgagatcaagccactgaactccagcctgggcgacagagtaagactccatctcaaaaataaaaaaaaatttctaaagcaagcgcttgggctgttctgatgtcaacatacagtagctggccctacctttaacccaggataaggggcaaaagtatacccaaagatacatgtaatcaaagttgctgggtgcagtggcccacgcctataatcccagtgatttgggaggctgaggtgggaggattacttgatcctggaggttgagaccagcctgggtaacacagtgagaccttgtctctgaaacctaaaataaaataaaataaaataccactgtgctctatcctgagcaacagagcaagaccctgtctcaaatataataaaaataaaaataatcagtccttgggtttagcatctttggactaatggtaccagcatgagggaaagcaggtctttgtagctctgataagtgaactttgacacttcttagtgtttttctctaactgtggtgacatacgaataacatataattaaccatttaaaaataagcggttcggtggcatttagtacatcacagtgttgtgcaaccaccacctctaggtagttccaaaactttttctttctgtttttttttttgagacagagtttcgctcttcttgcccgggcaggagggcaatgacacgatctccactcaccgccacctctgcctcccaggttcaaatgattgtcctgcctcagcttcccgagtagctgggattacaggcatgtgccaccgcacccggctaattttgtatttttagtagagatgaggtttctccatgttggccaggctggtctcaaattcctgacctcaggtgatccacccgcctcggcctctcaagtgctgggattacagatgtgagccaccatgcctggccccaaaacactttcctaactctaaaataaagtcccataagcaggtattccccactccctcctcctcccggcctgtccatccacaaatgaatggattaaacaatatggtttatccatacaatggagtataattcagctgtaaaaggggcttggcgcagtggctcacaccagtaatctcagcactttgggaggccgaggcgggcagatcacttgaggccaggagtttgagaccagcctggccaacatggtgaaaccaggtctctactaaaaatacgaaaattagccaggcgtgttagtgcacacctgtaatcccacctactcaggagactgaggcatgagaatcacttgaatttaggaggcagagaagttgcagtgagctgagatcctgccactgcactccagcctgggcaacagagcaagactctgtctcaaaaaaaaaaaaaaaaaagaggaatgagataccgacacattataccatgaggataaaccttgaaaacaacatgctcagtaaaagaagccagcacacaaaaggttacatattatataatgtaattttattttagtttttgaaaagctggtctcctgggctcaagcgatcctcccttcttggcctcccaaactgctgggattacaggtgtgagccactgtgtccggcctatgattttttttttttaatgaaatacctggaaaagataaatccagagaaacagacggcagattacaggctctttttaaattggtttctgacactatcacaagataaaaatgtggtttaaaattgttgcttggtatgtcttattcacctctaaagatatactgttcatcaggccgggtgcagtggctcacacctgtaatcccagcactttgggaggctgaggcgggaggatggcttgaacccaggagttctaggctgtaatgtgctctgccaattgggcatccacactaagttcggcatcaatatggtgacctcccaccaggttgcctaagaagtggggaaatggtctaggttgaaaatggagcaggtcaaaattttcatgctggctgggcacagtggctcacacatgtaatcccagcactttgggaggccaaggcagatggatcacctgaggtcaggagtttgagaccagtctggccaacatggtgaaaccctgtctctactaaaaatacaaaaaaaaaaattagctgggcatggtggcatgtgcctataatcccagctatttgggaggctgaggcaggagagttgcttgaacccaggaggcagaggttgcagtgagccgggatcacgccactgcactctaacctgggcgacagagtgagactccatctcaaaaaaaaaaaaaaaaactttcatgctgatcagtagtggaatcagcttgtgaattgccctccagcctgagcaacacagactgcctcttactaatcccagcactttgggaggctgaggtgggaggatggcttgtgcctaagactttgagactagcctagccaaaatcccttctctacaaaaaatgcaaaaattagctgggtatggtagtgtgcacctgtagtcccagttactcaggaggcttaggtgagaggctcacctaggcccaggaggttaaggctgcattgagctatgattttgccactgcactccaggctgggcctaggcctttgtagtcacagctacttgggggcaaatgtaggaggatcacttgagcccagtaggtcgaggctgcagtcagctgtgttttttgagacatagcaagaccctgtctcaaaaagaaaaaaaaaagtagctacaagctcatttatgcaaaggctaaccactgtcacaagtagagatgtgcagaactgagattcaaatggatggaatggcaagaaaaactgccacttctgtgaacctgaagtcaaactgcccttgtcgtcaagataaaaggtatacatggtgtgagcctgggcatctgaaaggtgttgcagctttttcttttatttttttgagatggagtctcactcctgtcacccaggctggagtgcagtggtgcgatctcagctcactgcaacctctgcctcctgggttcaagcaattctcctgcctcagcctcctgagtagctgggattacaggtgcccaccaccacacccagctaattttcgtatttttagtagagatggggtttcgccatgttggccaggctggtctcgaactcctgacctcaggtgatccgcctgcctcagcctcccaaagtgctgggattacaggtgtgagccacctgtaattagccaggcttggtggtgggtgcctgtaatcccagctactgggaaggctgaggcaggagaattgcttgaacctgagaggcggaggttgctgtgagccgagatcgtgccactgcactccagcctgggtgacagagtgagactccatctctaaataaataaataaataaataaaatgagatgatttctgagtgagttaactaaatcaggatatgcagaacaatgccaagcatatattagccactaaagaatatataagttgcctgaaagcccctttagggtttaaacctggacttcattattcacaatcacattcccggtccccattacggagcctggtcacctgggtgcttgttagatatggaaatcatcagatcccaccccagaccgagtcagaaacgttgagggcaggagttcaagaccagcctggccaacatggcggaaactccgtctctactaaaaatacaaaaattagtcaggagtggtggcacaggcctgtgatctcagctactcgggaggctgagacatgagaatcccttgaacctgggaggcagaggctgcagtgagccaagatggtgtcattgcgctccagcctgggtgacagagtgggactctgtctcaaagaaaaagaaaaaaagaaaagaaattgcagcttctgctcaggaagtctggagtgggccaggattctgcattttaacaactcccaggagtgttagtggggctggtttgtggactcgcctttgagtcgttggtctccgctcaatcaatattagataaaatgacagtattgggagaaatccagggggctctggaggaccgagggatcatattggaggcagatagggcagagaaaggtggaggaggtgggagtcgggtgtggctgtggaggaagctacttaaatccggatttgatctttgctagttcttatccctggacctgaacccaggcgcacatctggattagaagatgccaggctcagaggatcttcgtaaaggtaagccagaaaaaatgagaaccgaagcaaagacacgtgaagaagtggaaagcagctggcggcgggaaaaggcagagggaccaggcggccgaagctggtgcttcgtccacgtgggtggcagggacttcccacagaggctgtcatcgtttttgttgttgttgttttgttttgttttgtttgtcttttgagacagtctcactctgtcgctcaggctggagtgcagtggcacgatttcggctcactgcaacctccacctcccaggttcaagcaattctcctgcctcagcctcccgagtagctgggatgacaggcacacgccaccacacctggctaattttttttttttttgtatttttagtagagccgggggtttcaccatattgaccaggctggtctcgaactcctgaccttgtgatccgtctggctcagcctcccaaagtgctggggtgacaggcgtgagccactgcacccggcccaagttttgtatctttatagagatggggtttcaccatgttagctaggttggtctcaagcccctgacctcatgtgattggctggcctcggcctcccaaagtgctgggattacaggcatgagcctcggtgcccggccgcggctgtcatctgacagcacaggcaaatgcagggaagcctgtttctgccttcaaatccgaaatcttctccctcgtagttgtgtcctaattcttcccaccccgatgcttgttcttgagcacaggggaatctgattcctatgaggatgattaggtcctagatagaatataggcttagccaagctggaaatctcatgttcatgagcacttactagactctggagctgctgccaaaccattttcaggcatgatgcgattcagatcttttagagcgaggcatgcggtggctcatgcctgtaatcccagcactttgggaggccgaggtgggcagatcgcttcagcccaggagttcaagaccagcctgggcaacaaaacaagacgttgtctctacaaaaaatacaaaaattagccgggcatgtcagtgttgtgtagttccagctactcgggaggctgaggtgagaggatcgcttgagcctggggaggttgaggctgaagtgagctgtgatcatgccactgggcaacacagcagtacactgtctcaagaaaaagaaagtaaaaggtgacatccgtgacagcagtgatgttatttttctgcttatttccttgctatattcctaaaagaatatacttaatgaacattgaataaatgataagaataaaaccatgtccatccatttcaccttggattgagttgcctatttctacacaaagaaaatagaacccaagaggtaaggcacaagcgatcccttatttacgtatttatttatttatttatttattattttcttgagacagggtctccctctgtctcaggctggagtgcagtggcataatctcggctcaccacagcctctgcctctgaggttcaagcgattctcctgcctcagcctcccgagtagctgggactacaggcgtgcaccatcacgcccagctaatttttgtacttttagtagagacagggtttcaccatgttagccagaatggtcttgatctcttgacctcatgatccgcccgccttggcctcccaaagtgctgggattacaggcatgagccactgtgcccggccaaatttttgtgtttttaatagagatggggtttcaccatgctggccaggctggtctcaaactcatgacctgatatgatctgcccgccctggcctcccaaagtgctgggattacaggcgtgagcaagggatcccatatttaaatgataacagaaaaaaaggatggaggaaccaagggggaaaggaacaaccttttcctatgaaaatgacaaatgaggcttggaaaaacaaggacaaaaggcagatcaagttgtcctcccgcttcagcctcccacagtactgggactgcagcctgaggcacgaccccggccagcagtgtctccatatctaagaacctcagtcacggccgggcacagtggctcacgcatgtaatcccaacactttgggaggccgaggcgggtggatcacctgaggtcaggagttcgagaccagcctagccaacatggtgaaaccctgtctctgctagaaatacaaaaattatccgggcatggtggcgtgcgcctgtaatcccagctactcgggaggctgaggcaggagaatcgcttgaactcaggaggtggaggttgcagtgagctgagattgtgccactgcactccagcctcggtgacagaacctcagtcacttgatcatcacgttgtacctcagtggaaaggaaaggaaagctcaggcttttgagaatggagttgttagcatttcccatttgtgtctttttcctcctctttcaaggcaaggaccagatgcattcacacaggaaacgaaccatgttcactaagaagcaactggaagatctgaacatcttgttcaatgagaacccatacccaaaccccagccttcagaaagaaatggcctcgaaaatagacatacacccaacagtactgcaggttggaaaatgatccctcttctcactaaactgccttcctgatctaatctaaattcagagtccctctaggataattcctgaggtctcattccaatcgccaatattccccaaacccacactctcctactcacgtccccgtaaacctttcttcaaccccctagagcaagaatgggaaaatttttccagtaaaggaccaggtagtaaataattgaagctttgtgggccataccgtctctctagcaactattttaactatgccaccacagtgcgaaggcagccacagacaacgtaaacaagaggcccatctgtgttcccagaaactcttttactcaggttggagcacggtggtgcaatcacagctcactgcagcctcgacctcccgggctcaagcaatcctaccacctcagcaccccaagtagctgggactacaggtctacaggtgcacactacgcctcccaaagtgttgggattacaagcatgagcccggctgtattttattttttgtagagatggggtttcgctatattgcccaggaggctgatcttgaactcctggtctcaagtgattcacctgccttggcctcccaaagtgtcaggattataggcataagccactgcgcctggcctgaagtttatacaattttcacattacaaaatagtgttgttttgttttgttttaagacagggtgttgctcttgcccacattggagtgcagtggcacgatcatagctcactgcagctttgaattcctgggctgaagccatcctcccactcagattcccaagtaggtgggactacaggtgtgtggtactacagcctcccgagcagctgatactactggtgtgtaccaccaggcccagccaatttgtgtgttttttgtagagatggggtttcgtcatgttgcccaggctggactcaaactcctgaaatcaagtgatccacccacctcagcctcccagagtcctgggattataggcatgagccactgtgcctggccagtagtattcttttattttctctcttttttctttcagtcccaacacacatacaacacaaaatagtactcttattgtgtttgttttttctcaaccattttaaaacgtaaagcctattcttagtgcatgggtgatacaaagacagggggtggtcagatttggccaccagccttagctggctggcctgagccccagagcagcccctgcgactgatccccttgctctcctatcccctgctctgggttttctgacccctgtctcaatttctgtccccaaaatctctcatttctgctccttcctgggagtagattgagtagggttccacaaagaggatgtaagtggccaagctgtggcactagctgttctcacctagaagtactcatattatcaactaaaaggaaaacttgggttgggtatggtggctcatgcctgtaatcccagcagtttgggaggccgaggtgggcggatcatgaggtcaggagttcgagaccagcctggccaatatggtgaaaccctgtctgtactaaaaatacaaaaattagccaggcatagtggtgtgagcctgtagtccccgctactcaggaggctgaggcagaagcatcgcttgaacctgggaggcggaggttgcagtgagccgagatggtgccactgaactccagcctgggcgacaaggtgagactccatctcaaaaataaaataaaataaaataaaaataaataaataaataaatattaggagagtttaagggccaaaaaaaggaaaaaaaaagaaaagttaaaaacttaaaggttaaaaaaaagaatataaataaataaaatacgtttaacaaaataaaaattaaaaagtaaaaattttttaaaaatagaatgacaagtcatctgaattccaccccattctcttctctctcttcccttcaggtctggttcaagaatcacagagcaaaactcaagaaagcgaaatgcaagcatattcatcaaaaacaagaaactccacaaccgccaataccagagggtggggtctccaccagtgtcggcctgagaaatgcagacacactacccagattgcccaacgctgctcacccgatcggcctggtgtacacgggtcatcgagtcccctcattccagctcatcctgtaccccaacctcaaggtccctgcaaatgacttcattggccacagaatagtccattttggctgctgccgagatcctaatatatactgcctctaccccattttggaatcccaagtttgcgctccaagcttccattctggctctcctgcctgttcatctaaccaaagtcgagagagatgataaatacaaaaagtcacatgttgtaatgatgtgtgtgtggtactgtgacatttgcgtttggtcttcgtgcctgtttcctggaaagcagctccagagttccatggagtctccaaagtgccatctttttgtattttgtgtgctaatgttgaccgatagcttcaggatggggactggtctctggaaagaccccagtaggattagagggcaaacttctgggaggggaaggaagctgagggtgaggctgatcaccattggccagtggtttcatcagtcatgtctgggtaaggaagcatccatcaaaacccaggaggacagggtttgaagagatccctgacagctaagcatgcggacgtacctggagggtggcatatccggggagggcatggaagctccgggcccctcgtcatacgcctcatcctagcagggtgcggtggctcatgcctctaatcccagcacgttgggaggccaaggcaggcggatcacctgaggtcaggagtttgggaccagcctggccagcatggcgaagcccatctctactaaaagtacaaaaattagccgggcgtggtggcttgtgcctgtaatcccagctactcgggaggctgaggcaggaggatggcgtgaacccgggaggcagaggttgcagtgagctgaggggattgtgccactgcattccagcctgggtgacagagcaagaatctgtctcaaaaaaaagaaacaagaaagcacagaggaccagctggaatatttggaagaccagaaaatgtccttaaaactcaaaatgcctgggcatataggtcaggtccacctagccttttgaatcaatgcgaacccttcctcaaggcctggaggttggcaacacaaaatcaccctgtggagaacctaaagcattccctctctgagagttgagtcaattgggattccacccccaaaattcctaaaaatctcaagttcctagaaaattctcagaaaaagcaagctctcctatacctccctggctgtactctgatgcaacttggcaaccatcagagaatctccatccccttgaaccttggtcctctgccaatgttcctcacgcctgtaatcccagcactttgggaggctgaggcgggcggatggcttgagcccaggagttcgagaccagcctggccagcatggtaaaacctcatctctaccaaaaacatcaaaattagccagtctcatatactggtctcaaaataaataaatagattaaaatttaaacataaaataaacatgagtgtgttagaaagaacctactggcccggcgtggtggctcacacctgtaatcccagcactttgggaggcagaggcaggcggatcatctgaggttgggagttcgagaccagcccgaccaacatggagaaaccccgtctttactaaaaatacaaaattagccaggcatggtggcgcatgcctgtaatcccagctactggggaggctgaggcaggagaattgcttgaacccgggaaggggaggttgccatgagccgagattgcgccattgcactccaagcctcctgggcaagaagagcaaaactccatctcaaaaaaaaaaaaaaaaaaaaggaacctactgtaggatttggagttgagtaatttcagatagaatcaaaggaagagaaaggtctggattgggtggtgccagcggcagcttctatgactgagtatctcaatacatcttatctataggacggctgactagaaagaggacaaacctataatagataaatgggcggcagccattgcttagccataggcgaatatttgatgggttggggctcaggacaaatgttaaaaacaatcttaataacagcatgccggcccggcggcccacacctgtaatcccaggggatttcagaggtggagggggaggcggaaggattgcttgagcccaggaggttgaggctgcagtgagctgtgattgcaccgctgcactccagcctgggtggcagagcgagcccctatatcaaaacaaacattatcaagaaaaattattaaatgaataacaaaaacaggctgggcacggtggctcacgcctgtaatccaagtactttgggaggctgaggcaggtggattgcttcaactcaggagtttgagaccagcctaggcaacacggtgaaaccctgtccctacaaaaacacaaagaaggagtctcgctttgtcgcccaggctggagtacagtggtgtgatctcggctcactgcaacctcctccatctcctgggttcaagtgattctcctgcctcagcctcccaagtagctgggactacaggcatgcaccagcacacctggctaatttttgtatttttagtagagatggggtttcatcatgttggccaggctggtctcaaactcctgacctcaggtgatccacctgcttcagcctcccaaagtgctggaattacaggcttgagccaccatgcccagcctctacaattaattaaaaaagaaccataaccccaaaacttgtacaaccaccagtccaagaaaccaagtcacaatttctgcagcaatcagccccaaatgcccagggcttgatccatcactcgtagcttccctagtttttgtgcccatcccccaaccttgatttcaatttaggaccaaccagagaaacccaatgtttggctaaacaatcccacaggatcctacttctggttagctccctggcggcctcccaacgtcagcagcctttggtcaggacatatctgaagacttcgttttttttctgctataaagctttctttccttttttttttttctcctgaggtgaagtctaactctgtctcccaggctggaatgtagtggcatgatctcggctcactgcaacctccgcctccctggttcaagcgagtctcacacctcagcctcctgagtagctgagattacaggcatgcaccaccacacctggctaatttttatggtgtttttttttgtttgtttttttgtttctttttgtagagacggggtttcaccatgttgcccaggctggtctcgaactcctaacctcaaatgttctgcccaactcggcctcccaaagtgctgggataacaggcgtgagccactgcgcctggccatggaacctcactctttaaagtgtgcagggaccccagtcattccccactgtgtcgcggttcccataacagtgcctgtcaccaagtatgttttcaaaatacatttttggaagagagagagaaacagaaggggagggggtaggaagagaaagtaggggaagaggaaagtgagagagggagacaggaagggagagggaagggagacacagagatgaagacaaagggaaagagacagaggccgggtacagtggctcatgcctgtaatcccagcactttgggaggccgaggtggcggatcacctgaggtcagcagttccagaccagcctggccaacatggtgaaacccccgtctctaccaaaaatacaaaaattatctgggagtgatggtgtgtgcctgtaatcccagctactcgggaggctgaggcaagagaatcacttgaacctgggaggtggaggttgtggtgagccgagatcgcacccttgaactccatcctgggcaacagaacgaggctctatctcaaaaaaaaaaaaaaaaacagaaagaaaagaaaagaaaaggaacagcttccaagcatctttggagaagggcttcactaacatcaaatcctgtcttcctctcatcaccttctagcccagtatttccccaacgtgagaataataagaatcatctggggagctgttaaaacccagactctgagaccagacaggggcatgcttcccaggtgtgggcatgatttttccctggggttgtatttaacaaagttcaaaacccaggaggtacaatcaaaacctgagccgtctggagactcaagacttcttagggaagacgaaaaagagaaattccggccaggtgcagtggctctcgcccgtaatcccagcactttgggagtccaaggcaggaggatcgcgtgatcccaggagttggagaccagcctggccaacatggtgagaccctcatctctacaaaaaaaaaaaaaaaaaaagagagagagagagaaagaagttcccagagaaagttcccagaggaaacaggagggaaaagggcgaggactgcacccagccagctagggtatgagtgtgaaccatagtctagggggctgggtgtgaattcccagtccaggggctgtgaatacgtggagacaccgatgctggccctgcacccagcctcctccctgggcgaactattgactgaagccacccctcgtgtccccactgttcctggtctcaacttcctcacctgatgaatgggcggggagggtaattcccctacggtggggcttttctcactctgttatgtgttcttacaaaatgtgctctctgatatcatctatatctccctagaaggaatcattagtttatctttttttttttttgtgggacagggtttcactctggtcgcccaggccggagtgcagtggtgcgatctcggctcactgtaacctccacctcctgggttcaagcgattctcccacctcagtctcccaaggcctggtgcggtggcttacgcctgtaatcccagcactttgggaggccaaggtgggcggatcacttggggtcaggagtttgagaccagcctggccaatatggtgaaactccctctttactaataatacaaaaattggccaggcgtggtggcgggcaggtgtaatcccagctactcggaaggctgaggcaggagaattgcttgaacccagaaggcggaggttgcagtgagccgagatcgtgccactgcactccagcctggggacagagtgaaactgtgtctcaaataataataataataataataataataatttaggccaggtgcagtggctcacgcctgtaaacccagcactttgggaggccgaggcgggtggatcacgaggtcaggagttcaagaccagcctggctaacatggtgaaaccccatctcaactaaatatacaaaaaaattagccgggcgtggtggcacatgcctgtaatcccagctacttgggaggctgaagcaggagaatcgcttgaacccaggagggggaggttgcagtgagccaagaccgtgctactgcactccagcctggcaacagagcaagactccgtctcaaataataataataataataatttaaaaaaaaaataaaaaataagaaataaaagaatgaaccacaatgtccctttgttctacaggccactcttgtgctatccacagttgccaaaaacccccacctgccttgtctatggacgcccatcgggtgataccacaaacacctttgatcctacagataccagggtaaattcagcatccaagtccttgaattcttcccgtgagtataagctgccctggctcagccctcttctttgccaggaacccaatccttcaaacttccctcaaagactgggtacttttagcatgactgctctagagattctgggtggggctcaaagtttaaccttcagggtcagcaacattttatggaaagagccacagagtaaatatttgaaacattctcgtacactgacactcagctggactggcaaagcagaatatctgtgtgtcagtgtgcgttttattcagccgttgtttgggtcagggtctgtgggcggcccctggcagctaatgccctcctgtgaggaacaatacctcaccatcaagcacagtccgtcacatattcttgccctggtcgctcgctctttctttcttttctttctcttctttctttcctttctttctcattttcgtttctttctttctttccttcttttctttttctttctgtctctctttatctatttctgtttctttctctctctctcacctttctttctttccttccttccttctttctcttcctttctttctctatctctctttctttctttccttccttctttccttgtttccttctttcttttcttttctttctttttctttctttcttttctttctttctctctctctctttccttttctttctctctctctctctctctttctctctttctttctttctgacagggtcttgctgtgtcacccaggctggaatgccaagatgcactcataggtcactgcagcccaaataaatttccccaggctcaggtgatcctcccacctcacccttccaagtagctaggaccaacaggtacatgccaccatgcacgtctaatttttatttttattttttgagactggtcttgctctgtcacccaggctggaatgcagtggcacgatcacagctcactgcagcctcgacaacccggcccctccaagcaatctcccccctcaccctcccaagtagctgggacctcaggcatgtaccaccatgccctgctaattttttattgtttgtagaggcggggtctccctatgttgcgcagggtggtcttgaacacctggcctcaagcaatcctcctgccttggccacccaaaatgctgggatcatgggcgtgagccactgtgcctggtctggtcttcctcctttcatcctcttagtccttgacctgtccctcttctagagtcctccctcttcatgaccctctcccccttgttggggctcagaaactgatacctctaaatacagcatgttaaaggtgcctcaagggccgggtgcagtggctcatgcctgtaatcccagcactttgggaggccgaggcaggcagatcacttgaggtcaggagttcaaggccagaccgaccaacatgcaaaaccctgtctctactaaaaatatggaaaaagaaaattagttgggtgctgtgacacacgcctgtaatcccagctacttgggaggctgaggcaggagaatctgggaggcggaggttgcagtgagccgaggtcacaccactgcactccagcctgggcaacagagcgagactctgtctcaaaaaataataagaaataaataaatgagcctcaaggtctctgacctcccccgatcatctcttccaaagcacaggcctttatctgtgtaagatccagacctgccaagaggaataattgttttttcttctcctccctgtgagacaaagaatgtaaccacacctgaacagatcccatcactgtcaataggaatgatttccaggacccattcatgctctctagtaatcctttattgccctcaatggaattcctctagccccctcccataatcagtttgccaggagaacatataagcttctgaacccccttgggggatgggcgatcactggctctccccatgctcaggttaaagacatttgtaagccttttctcctgctaatctgcttcctatcagttcttttcagccaaccttcagagagccaaaggcagccttcaccttggcctcaacaccttccatgccttttgcttctcctcctcccctgcaaagcattccccactccttgggttccccactttcaagcatcccaccctccctgttatatgtcatcctcctcattctctgcttttataacccttttaaaattatgggcccagccaggtgcagtgatgcatgcctgtaatcccagctctttgggaggctgaggcaggcagttcacttgagctcaggagtcctacacagctggggcaacatggtgagacccccatctctaccaaattgcaaatattagccgggtgtggtggtgtgagcctgtattcccagctactcaggaggctgaggtaggagaatggtttgaccccaggagatggaagatgtagtgagccaagatcacgacactgcactccagcctgggcaacagagcaagatcgagcctaaaaaaaaaaaaattaggtggggtgcggtggctcacacctgtaatcccagcactttgggaggtcgaggcaggtggaacacctgaggtcaggagtttgagaccagcctggccaacatggcaaaaccccatctctactaaaaatacaaaaaaattagctgagtgtggtggcgggtgcctgtaatcctggctacttgggaggctgaggcaggagaatcacttcaacctgggagccagaagttgcagtgatctgagataatgccattgcactccagcctgggtgatagagtgagactctatgtcaaaaaaaaaatacataaaaaaattaaaaattaaaaatcaatttaaaaaatgccagctagtatacttttcctctctcccttcctttttctatctctctctctttttttttttttttttttttttttttttttttttgagacagtttcactcttgtcgcccaggctggagtgcaatggcgtggggatcttggctcactgcaacctccacctcctacactcaaatgatccttctgccttagcctcctaagtagctgggattacagatacaagcaacaaatcctaattcttgtatttttcgtagaggcagggttttgccatgttctccaggctggtctcaaagcgaatgctggccaggctcatttttttaatttgaattgtgggaaaactgaggctggatcgaatggtcctggacatgccctggaacaaacaacatttagctgtgcaaggcacagtgtcagtgtctggtattggggtgccccagtctcaagtcccaagaaaaagacaaggcagaccatgaattttgtgtggctccaactcagttttcttcatctgttgcttcacttgcagtgccagaccagaatcactttgacctaaaactagctacgataattaacattcagtatgactcattacctaacaaattcaaaatgtaaggaactgtctttagaacttgttctatataaacatgttattaaggtctgctgcggctgttctatgcagctcttttttttttttttctggcgataggatctcactctatcgcccaagctggagagcagtggcatgatcacagctcactgcagcctcaacctcctgggctcaagcaatcctcccacctcagcctcccaaagtgctgggactacaggcgtgcacccctgcacccaactagttttgtattttttgtagagatggagtgtcactatgttgcccaggctggtctccaactcctggcctcaagcaatccaccaactcggcctcccaagtgctgggattacaggcggacgccactgctcccagccccagatttttttctcatttatatttccgcaaacctcaaaaaaacccccaaaggtccctaggtcagtcacttcccactagtaaataagtcagcatctttgcaaagatcaaaggaaaagcaattttccttaccacagagcctcttacaggaaagagagctctgattttccatatgttccccaaccatgctaggatgttcctgtgccctgatggcattcttactaacccattgttccattcctttccagccctccttcctgtaacgtaagtgcaggtgggagttggggattggtccgctaactgggtatagagaaaacagatgggtatgctattctcagtaagggagcttctgtcctgggaaaaatgtggcctctcctaaggaaccctatcccattgaatcaccctgattcactttttttttttttttttttttttttttttgagatggagtcttgctctgttgcctaggctggagtgcaatggtgtgatctcggctcactgcaacctctgtctcccggttctagtgattctcctgcctcagcctcccaagtagctgggactataggcatacaccaccaagcctggctaattttttttttttttttttttttttttgagacggagtcttactctgtgccaggctggagtatagtggcgtgatcccggcccgctggctcactgtaacctccgcctcctggattcaagtgattttcttgcctcagcctcttgaatagctgggactataggcgcccaccaccacacccagctaatttttgtatttttagtagaaacaggttttcaccatgttggccaggatggtctcgatctcttgacctcgtgatccacacgccttggcctcccaaagttctgggattacaggcgtgagccactgcgcccggccctaatttttgtgtttttagtagagatggggttttgccatgttggccaggctggtctggaactcctggccttaggtgatctgcccacattggtcttccaaagtggcgagattacaggcaagagccactgtgccctgcctctcacattttctctcttcccagatttggttcaagaacttaagagctaggccatgtgcggtggctcacgcctgtaatcctagcactttgagaggccaaggcaggcagatcgcttgaactcaagagttccagaccaccctgggcaacatggtgagatccctgactacaaaaattcgccaggtgtggtggcatgtgtctgtagtccctgctattcaggaagctgaggcaggcggatcgcttcagcctgggaggtcaagactgcagtgagctgagatggagacacagcactccagcctgagcgacagagccagaccctgcctcaagaaaacaaaacaaaacgataacactggagagccagagcaggaaccagtctcctctccaatctccaaacctgagagagacatgagtcacactgacggctttgcctgcctgcgatctctctatgtgtgttgattcttgcggaacaaggcgcttcgagcatctcctctgcccctacgcccgtgaccctgtccctcttcttgtctccattgccccccaagcgggtacatttgcccaccttctcacctgggacaccctgggcgtggatctcctcacctgcagcgctaggtgtgctcccagggtctccacatccctaacccccgcaaggctggcctctttacctgcaaagccccccgccgcggcctcctccctctaccataccccaatgccaggctcacttcctgccgcctgcctggaacggggctgctcatgcatcccccacgccctctgaagcccccccggcgcactccacgccctctcgcctgacccctgtttccgctgccggcgtctccacaccccctgacgccgccacgccctggaccgaggtctctagagctgcgcgccggctgcacgtcccttaggagtttccgtgcgccacgaggcgctggcgcgcgtctcccggcccatccaccccgggcccggcgacacctttctttgccacctggaaccaacatcttggttcccttttgagggatcagaacttgtttaattggaatacggcaaaattctgaatttttctgccgtctctattccaacttcagagttctgccgtccagccctgcgacaatcttccggtgccaacgcggcaggtcagtatgtatcccccacgatgccccccgggccacgggcccctagttaacaggtttccctttcgcccgctgcctggaagtatcgccacctcgccccgcccaaccccccaccagacagctctgcagccacagcccctcatccaaccaggaagtccagggcccatctggcccgctagacctcgggaaaccacggcgtcagagcacccattaagaggggtccaggccgggcgcggtggttcgcatcagggcgcccattaagaggggtccaggctgggcacggtggttcccatcagggcgcccattaagaggggtccaggccgggcgcggtggttcgcatcagggcgcccattaagaggggtccaggctgggcacggtggttcccatcagggcgcccattaagaggggtccaggctgggcacggtggttcccatcagggcacccattaagaggggtccaggccgggcgcggtcgttcgcattagagcacccattaagaggggtccaggctgggcacggtggttcccatcagggcgcccattaagaggggtccaggccgggcgcggtggttcgcatcagggcgcccattaagaggggtccaggctgggcacggtggttcccatcagggcgcccattaagaggggtccaggctgggcacggtggttcccatcagggcacccattaagaggggtccaggccgggcgcggtcgttcgcattagagcacccattaagaggggtccaggctgggcacggtggttcccatcagggcgcccattaagaggggtccaggctgggcacggtggttcgcatcagagcacccgttaagaggggtccaggctgggcacggtagttcgcatcggagcaccagttaagagggatgcaggccgggcacggtggctctaatccgagcactttgggaggatcacccgaggtgaggagttcgagaacagcctggccaacgtggtgaaaccccgtctttacggaaaaatacaaaatttatcagggcgtggtggcgggcgcctgtaatcccagctattcgggaggctgaggtgggagaatcggttgaacgcgggaggcggaggttgcagtgagccagtgagccgagattgtgccgctgcacttccagcctgggcggcagagtgggactccgtcttggggaaaaaaagggtagtccaggccgggcgtggtggctcaggcctgcaattccagcactggaggaggccgcggcaggaggatcgcttgagaccaggagttaagagacctgcctgggcaatatagtgagacccctgtgtttgtttgtttgttgagacccttgtgttaaagcaaactaaatatggcctgagaaggactccgtaattctatatttgagtccttgtggatgaactgcaacctaacttaataggtacaaaagattgaaaacctaagttaggccctgcgtggtggctcacgcctgtaatcccagcactttgggaggccgaggcgcgcgaatcacctgaggtcgggactttgagactagcctgaccaacatggagaaaccccgtctcttctaaaaatacgaaattagccagacgtggtgactcatgcctgtaatcccagctactcgggaggccgaggcgggaggatagcttgaacccggaaggcggaggttgcaatgagccgagattgcgccattgcacactctagcctggtcaacaagagcgggaaactccatatcaaaaaaaaaaaaaaggaagcctaacttacgttttatgcgcctgtaaccgccactgagtgttggccaatcccagcagcccagcagctgtacttcatccactcacaggctgctgagcattcaaactgtgttcaaataaggcaaacgctgagcggtaaccaatccagctctttctgtacctcacttccgatttctgtatgtcactttccttttcttgtccataaatttgttctgaccacgaggcacccctggagtccgtctgaatctgccgtgactttcggagctgcccgatttgcaagaggttcattgttcagttgaactcctttacatttatttattttatgtattttattttatttattttatgtattttattttattttatgtattttgttattttattttattttatttattttatttttattttgtttcatttttatttttattttattttatttttattttcatttttttgagacggagtctcgctctgtggcccaggcgggagtgcaatggcaccatctctgcgcactgcaacctccgcctcctaattcaagtgattctcccgcctcagccttacgagtagctggtattacaggtgcccaccaccacacctggttaattttttctgtttttagtagagatggggattcaccacgttggcccggctggtcttgaactcctgacctcaagtgatctgcccacctcagcctcccaaagtgctgggattacaggtgtgagccactgtacctggccccctttaaatttaattcggctgaagtttttcttttaacagatggtgtcagaagcggagtccagagtagagcttctaggaaccttcgggagtgctgagtgaacacgcaaggtgcctgcggaacccacttgtgtccattgacctctccgagtggccggggatcgtgggtaagttccctctcggatttcagagctccacagatttgtgttttgagctctccgagtttcattgagcaaatatctgatccaaactgggtttggaagctgtgacagaaactggactggttctgggaatggatctgatgtggtaattagctggcttggacccagttagaggcctcttacatgtgactgggtcagaaagaaactggtagcaaatggtaatattgcaggaggtgtaaaatttggcttttaaaaattaacagggatgtttgtgttctacccctttgtttcatttttcttgtgcacttaggtattaaaaaaaaaattactgggtaagttaatcaagggaacctgagagtaatgaatgccaatattttaggtaaaaatgggatctttttttttttttttttgagatgaagtctcgtttggtcgcccaggctagagtgcagtggcgcgatctcggctcactgcaagctccacctcccaggttcacgccattctactgcctcagcctccccagtagctgggactacaggcgcccgccaccacgcccggctaattttttttttttgtattttcagtagagacggggtttcactgtgatggccaggatggtcttgatctcctgacctcgtgatctgcccgcctcggcctcccaaagtgctgggattacaggcatgagccaccacgccctgccaaaaatgggatccttaaattctgaaaaactgagttccttctggcttatacattaggcacgggaaggagcaaagacttacagaaatggcaaaatctgcctgagcgtggtggctcacgcctgtaatcccagcactttgggaggctaaggtgggtggatcacctgagctcaggagttcgaaaccagcctggccaacatggtgaaacccatctctactaaaaagacaaaaattagtggggcgtggtagcttgtgcctgtagtcccagctacttatgaggctgaggcacgagaattgcttgaacccaggaggcggagtttgcagtgagtggagattgcaccactgtactccaacctgggtgacagagcgagactctgtctcaaaaaataaaaatggctgggcgcagtggctcacgcctataatcccagcactttagaaggccaaggcaggtggatcacctgaggtcgggagtttgagaccagcctggccaacatggtgaaactctgtctctactaaaaatacaaaaaattagccaggtgtggtggcatgcacctgtaatcccagctacttgggaggctgaggcgggagaatcttgaacccaggaggctgaggttgcagtgagccaaggttgctccattgcactccagcctgggcaacaggagcgaaacactgtctcgaaaataaataaataaataaataaaaattaaaaaattaaaatgagggctcccgaaagttaaatctgctaatctttcagcttcgttactatcctgatccaaaggaagcagactgcagcaccagttggctgactttggataagtaatggggtccattttacctgagtaaagtatgggatggggtcagaggccctcccctcagtaaagtcccccttggttaaaaatgggttaaagatgacagggcccagctggggtcaagtttgagccttgcgagttcagtattgggtgctaagcacagtggccagtgtctgtgttttgtcacgtattttgctttggcgccatgatgaaaaaatgttaattggcttaccccacgcaaccccttcggccacacttgcaaaactaagaggcttttgcttaaggttccataaaacagaaaaagaatttcctttgtgatgccgcaggcttggccctcaggactatagtgtggcaagcagagtcactaggaccacctgggcaaagggaacctagaagcctggcatgctggcaaaaggtaaagtatttcttaccaattagactgtggcccctctgtgcaaactggttagatgaacggtaaaaatcactgtttatctcctctgtaatgctttgattaatacaaaaaagaattctgaggttggtcttaggaagctgtaataaatctggtatgctttgtgtctttctgtattctgtcacgaagaggggtaccttcggatgaaatgcgtgcccagggccgcataagcccgctgttcaagacggcccagcaaactggtcaatcatgtccttggaagcttaacctcctaataccatgtggccctgctttctcttttcacaacggcaggccaggttcagggttccattcccggcttactcagcgagtactttctggtgtcacctttaccatgtgttgattctcttccctctgtttcttatagaacacagaaatattagctgtttggcctagccaaggttgggtaataaaagatttaaaaggactttttaaaacaagcgctatagttaaaactcaggtacattaaaagtggatatttggccaggcatcgtggctcatgcttgtaatcccagtacttggggaggctgaggcaggtggatcacttgaggtcaggaattcaagacaagcctgggcaacatggcataactctatctctactaaaaaaaaaaaattagctgggcatgttggtgcacgcctgtaatcccagctattcaggaaggcgggaaaattgcttgaacccggcaggcggagcttgcagtgagccaagatttcaccactgcgctccggcctgggtgacagagcgagactccgtctcaaaaaataaaaataaaataaaaataaaataaaataaaataaataaaataaaagtgtagtgctcgcttcagcagcacatatactaaaattggaatgctacagagaagattagcatggcccctgcacaaggatgacatgcaaattcatgaagcgttccatattttgtgcatcctggcaagatcatttctgtatctgctaactagcactaaagaaatagtgtgaatctaagcaaaaatgagtggcacccaaaaacaaaattgtggttttcattaaaaaatataaatatttatataataaaatatatatgatatataaaaaataaaatatgtataataaaatatacataatatatataaaataaaaaagtatataaaaaatatatatgtgtgtgtatattcaaattcttttttttttttttgagacggagtttcactcttgtcacccaggctggagtccaatggcacgatctcggcttaccgcaacctccacctcctgggttcaagtgactctcctgcctcagcctcccgagtagttgggattacaggcacctgccaccacgcccagctaatttttgtatccttagtagagacagggtctcgccatgtaggccaggctggtctgaactcctgaccttgggtgatccacccgcctcggcctcccaaagtgctgggattacaggtatgagccaccgtgcccggcaatgtatatattcaaattctaacagcctgggactccttgggaaaaacaggaggcaccagagacgccattttggaaaaaaacctgttttcctcatggaaccacaggaattggaaatggatagattccccttcagaaatctaaggctctgttctttttgggattcaggatctggtataaaaatgggacccttaatttttggagacctgtgttgctttctgctgtgcccacttattatattgggccctagaaactgcatgctttcctggtcctttttgtccaaggactccaccctaaagccagtaatctcaaataaataaataaacacctaaatcaaatattttgaaagaacaataaaaactaatgccttttagttcacataactttagtaatctttgggaaataaaaagttttaaagattattgggaaaaatgaagacatttagtctaaattaggcaggtcagatattaggtttgttcgatgctttaaggtcatcaactgcttcttaggcttttgaaaattgttcagtttacctacttgggagcattagattctagataaggcctgggaacatgtggaattagccatgcactctatctatgcaaaggttataaagaaaagagattttttttttaattaacaaaaaccacaggtggttgtgctccgcctacccagcacagcaggtgagatggtgcaccctcagtggactgaagaggccatgggatcccacctcagccggatagcacgctggccttcaccttcattgtgccatggcagctttcgtgtgagccactgactcgtgtacatgttagactccttggtctataagaaagcatcttgtatggtaaattgttgttctaaagtaaaataactggtttgttcaaaaaggggatgctaaggagaagtcagaaagtcaaagcatgttgtagatggtctgggaaagtcgtgaaagggttcgtgaaaggaaatttaagccaccaaaagtaaaagttgctagttaccattataacatatgattgaaactactgaaaaaatagttttacatggaaagtgtgtgagaagagtgaaacatgtttttggtaaaatatttttaaaaggcaggagaatgtcaaatttcacctagttgagagggttatgtgatttttaaattagataagaataagctcacggtttgaacaagttgtggaaggtttgtaaaaactaatcttgcaaaaaaaattctgtgtgcaaacacgttgactaaatttaaaggggtattttccagttttccataaattaaacattgaaatgaaaggacaaacagggtttctttttttgtttttttgttgcccaggctatgggcaactatgtagctaggcatgttggtgcatgcctgtaatcccagctactcaggaagctgaggcaggaaaattgcttgaacccaagaggcagaggttgcagtgagccaagatcgcaccactgcattccagcctgggtgacagagcaagaccctatctcgaaaaaaaagaaaaaagaaaagcaatagctccctgggtgtcaggtatcagtgagaatgggaagtcaggtcttctctgactcctaggacattcctctctctgtctttgggggttgaattccttgttagaactccatcttgttaaaggggcctcgcacctgcccttgccttctgcagcagccctccttaatcctctccaaacttccatctccagaccaccggattctcctcatgagtgccctgggtggacattggtgaaaggtcactgccttcaggacacaccataggtacagtcaccgaggtaacccagttcaaagaagagcaggatgttcagtatttacaaagggatctagcaattggtccaaaccagtcagtgctggcatgcaccgttcatcgtgccatcagtggcaagatggagatctggcaatgcatggctcacagtaagatacacgccctgtgccattccaccctatcattagaaaaggagtcttctttttctttctttctttcttttttttttttttttggagacagggtctcactctgttgcccaggttgtagtgtaatggtgcaatcttggctcactgcagcctctgcctcctggggtcaagtgatcctctcacctcagcctcctgagtggctgagatcacagatgccagccaccacgcctggctaatatttttgtttgtttgtgttatgttttttgagactgagtcttgctctgttgcacaggctggagtgcaatggcgcaatctcggctcactgcaacctccacctccctggtacaagcaattctcctgtctcagcctctcaagtagctgggattacaggcgcctgccactacgcccgcctaatttttgtatttttagtagagacgaggttttgccatgttggccaggaatggccagacctcaaatgatctgcccgcctaggcttcccaaagcgctgggattacaggtgtgagccactgcacccagccaatttttgtatttttttttttttttttttttgtagagacagggttttgccgtgttgcccaggctgatctcgaactcctgacctcaggtgatcaccttccttggcctcccaaagtgttgggattacaggtgggagccaccatgtccagccgctttttctttttaaaaaaaattttttttgacataacagacaacaccactctcttttatttttttatagagacggggtctcattatgttgaccagtctggtctttttaaattttatttttttgagatggagtctcactctgttgcccaggctggagtgtagtggcgggatcttggctcactgcaacgtctgtaccccagattcaagtgagtctcctgcctcaggcttccaagtagctgggattacaggctcatgccacatcgctggctaattttttttttttgtatgtttttaaattttatcttttaagtagagacagggtttccccatgttggccaggctggtcctgaactcctgacttcaggtgatccaccctcctcaacctcccaaagtgctgggattacaggcatgagccaccatacccagccttcctgctatttttgaactacctgtaccaggctggtttctctgggtgaggggagtggtcaggcagaggcaggccccgtcatggtaagcagctaggagactgctagagattgacagggcactcatgagtgccctgggtggacactggtgaaaggtcactgccttcaggacacaccataggtacagtcaccaaggtaacccagttcaaagtagagcaggatgttgggtatttacaaaggagatctagcaattggtccaaaccagtcagtgctggcatgtaccgttcatcgtgccatcagtggcaagatggagatctggcaatgcatgggctcacagtaagatacacgccctgtgccattccgtagacgtagatcaagcgattattactgcagaaatctccgtggacgtagagcaagcaattattactgcagaaattgcaggagcaggttctgcagcatgtcacatccaaagaagcttcccttgcaagttggtaaccttgagggcttcaataccacacagagttggtctaggtgatggctgaccatccaggcataataatttggggaacaattccaggatggaggttatgttgctagacttgtttgtccgggaaagtggtagacaggaagttcctgtctgcacacgtctcctggctccagccctttcccctgtccatctgtcctacagactccgcctcaggcatgttgtcttggaggacgtgcagaaaggcagccatgcactttctaggtttcgatgccgtcttagagtcactggtcaccaggtctgggtcaaacgggagtctctggctgtcaagactggactgggaggaatcacatcgcttcttcaccatcagctttatctgctttgccttttccgacttcagctttctctgcagggggtatcagtggggttgacaaagattgacatctttttgttatcctcatccctaatcttgccactgacattcttcagtgcctaggcgatgctggcattctccacaaagatgtgggcctgcattttctcatagcgaaactgaatcaggaggaaggggcattgcattgactctgaatcaaattcagcagccacttctcattttatgcagatcttgaactagcagctccctaaggtccgatctggcctgtttccctctgttcttttctctggaggtttttggcgctttctctgtgttaacatgggtttggtcttgtttatggcaagtgcctctccatggctgggtgcggtggctcacgcctgtaatcgcagcactttgggaggccaaggctggcgaatcaccagaggtcagttcgagaccagcctagccaacatggcgaaaccccgtctctactaaaaatataaaaaaattagccaggtatggtggcgggcgcctgtggtcccagctactcaggaggctgaggcaggagaatcgcttgaacccgggaggcggaggttgcagtgagctgaaattgtgccattgcactccagcttgggtgacagagtgagactctgtttaaaaaaaaaaaaagtaagtaaataaataaatgttgatattatgtagccatgttatgtagttttgcatagcctttctctgtcttatagctatgaaagacaatttccaaaacatagcctagaatggagaattgaagataaagtgagaactgttgggcatagtaacctaaaaagggatcccctctggtgtggaaagattgttccaacgcaaaagggactgagatccagagatggcagttgtttgagatctggaatcttcagaagaggtagatcagacttgctcaggaaataatgggtcctaccatcacagcgggtacggatggggctacaagatgagagaggctggataggagagtatttaaggaaaaaaaaaagacagaaaaggaccaaaggacagtctgtgagaccccagagaatgcattaaacctgaagaatttctgaacaatgacgtctgatattcaggcttccgttgtttctttttgtgctgtaatcttccgtgttttctctgcacatagctcagtaaagctctattcaccagttaacctagagtctgtcttgagataagcagggagggctgtgacggctgcacaagggcggagtggtttgtagacctgaaaaggaacttgtaagagctggcagatcttaaccaggagagggagcccctttccacagcctagaagcttctgaagtcatttaaatggaactgaattatatgaagtcaaatgtcagttggggaaaaagtcaaactttattatttatttatttatttgtaattgtgcgtatacatatatatatatatatatatatatatatatatatatatatatataattttttttaaattatgatctccgtgatagtaccaaatcaaactttttttggagacagagtcttgctctgtcacccaggctggagtgcagtggcgtgatctcggctcactgcaacctccgcctcccaggttcaagcaattctcctgcctcagcctcctgaagagctgggattacaggcgcgtgccaccatgcccggctaatttttgtatttttagtagagatagggtttcaccatgttggccaggctggtcttgaactcctgacctcaggtgatccacccgccttggcctcctaaagtgttggaattactggcatgagcgaccacgctggcccaaaccctgctttttactggagagacgaggtagccctaagttaaaaaaaaaaaaaaaaagaccctgtttcacttcttttggatatacccggggtgacattgctagatcattctgcaattcctccttttttttttttttttttttgctgggggtgggatagagtctcactcccaggctggagtgcaatggtgtgatcttggctcactgcaacctccgcctcctgggctcaaacgactctcctgcagtgaggagctgggattacaggtgcctgccaccacaacctgctaattttttttttattttttgtatttttagtacagacggggtttcactatgttggccaggctggtcttgaactcctgaccccgtgatccgcccgccacagcctctcaaagtgctgggatgacaggcatgagcctccgcgcccagtagatcattctgtaattctgtgtttaactttttcccccctaaacttaactgaagtgatatttaactttctgaggaatcaccaaatcaaaggtgacttttgagacaaatacaggaagtggaggtggttttcctcatgtagatgaagacattctaaacccagaactgaaaacacacatggaatccttttaagtatcaggatgccttggtggacaaaatggatacatccaacttctcaaggagcttaatattcagtattaaagctgaggtgagctcaggtgattcacgcctgtaatcccaacattttgggaggccaaggcaggcggatcacttgagcccaggagtttaagaccagcctgggcaacatagtgagacccctcccccctgcccccgtctctacaaaaaataaaaaaattacagacgcatggtgtagtcccagctacttggcagtcaaaggtagaaggactgtttgaacccaggagtgggttgaagctgcagtgagccttgattgtaccagtaaactttagcttgggaggcagttgagaccctgtctcaaaaaaaaaaagaaaggaagaatttctctctcccaacttcccttggtttctcctcgccccccggctaaaaagtgattggggaccttttaaaaaacttcctgctctccacagaatgggattacagccccgagatgatccataaaagattttcaggaagaatgaagagtttagggagtgaaggttctaaaacagtaaatagagtgtcacaaagaaatccattcatctctttgaaggctgggtatttggaaaaagagagaaagaaagcttcattcagagagcgctcgcctgtatttaggggtgtttggagggggcggggtgactatagaattagggtaaagttcagtgtcttgcaaatcagccctgaaatagccctgatccctgcaggcctgtctggtttcccaaaccctccactagctttcaaatttgcattaaaaagcttttggcttgttcattctgttctttctttcttttctttcttttatttatttattttttttgagacggagtctggcactgtcacccagactggagtgcaatggcgcgatctccgctcactgcagcctctacctcccgggttcaagcaattctcctgcctcagcctcccgagtagctgggattacaggcgcccaccgccacacctggcttatttttttaatttttaatagagatggggtttctccatgttggccaagctgttctcaaacttctgacctggtgatccacctgcctcagcctcccaaagtgctgggattacaggcgtgagccactgcgccaggccctcattctgttacttctttctttcttttttcattaatttaagttctgggatacacatgcgggatgtgcaggtttgctacataggtaaatgcgtgccgtggtggtttgctgaacctattgacctaggtattaagcctcacagccattagctatttgtcctgatgcccttctgcctcctgcccattctttgttatttcttcatattccaattaatgttcattttgaggacctggctctggccaggcaaggttccagtctggagtcaaactgaggaaagtattacctttcacaaacacttagaccacgttgggaggggagaatgattgtcctccacatgcgtatgggtgtgttataaaccccaggaaggtaaatactaagcaaaggcgtgcacagataattattgcaactgatgattccacgtcaattgtactgtactgtgagtaggtttataggctgccgtgacaggggccatcacctgggtacgagggtgctggcttcctcttgaagacgtgactttaaaattgtgagttgaatagatgcaaggatattggcccagtggaggaactttgaggggagggggcagggtatcctggttgggaggaaattacatacagaaattggggagtggtgacaacattgactcttccagtaattgtctgggtgtggtaactcaggactgtaatcccagcactttgggaggctgagatgggaggattgcttgagcttgggagttccagatcagcctaggtaacacgaggagatctaaaattgaaaaaaaacgtagctgggtgtggtggctcattcctataatcccaacaactttgactcaggaggctgaagtgggaggatcccttaaggtcaggaggttgaggctgaagtgagctagcactttgggaggccgaggtatgtggattacttgaggccaggagttcgagaccaggctggctaacatggtgaaaccccatctctactaaaaataaaaaaattagccaggcatggtggtgcgcgcctgtaatcccagtgactcgggaggctgaggcaggtgaatcacttgacccctggaggcagaggctgcagtgagccaagatcataccactgcactctagcctggacaaccagagtgaaactctgtctcaaaaaaacaataataattttaaaaaaattttttaaataaaaaaattaacaaatgacccgcacatctggggtgaagtaagacgaggctggcagcatagctctgtcacctgtggttaggattaattaagctcagctttaaaggctggatcttggcctcctgggttttaattttgacttctccacttctcagccatgttttgttttgttttgtttgcttgaggagggacaaatcaggccagcattgagcctctttcccccgtgtgtcaactgagattgataattacaagattaaatgatgcttgtctgtgattttagcatctgttcagcccatcattcatttcaagagtattgactgggcttcagggtaggttccatgttagtactggggacgccgtgggtgggagggagactgggtctccaccctcctagagttatagtctaggcctgcggttaagcagatttttgtgcaggaatcaaacccactacactacctgtcagaaatcaagccctgttccaggcactgggaaactcagaatttaaaggggatgtaccaggtctctgtccttgcggagcattatcgatcagtagaagagagaaaataaacaagcaaacacctgagacaattgtaatagcaataatgtgatatcaataaaatgaaacagagcaacagaaatagggtagatgggccgggcgcggtggctcacccctgtaatcccagcactttgggaggccgaggtgggcggatcacgaggtcaggagatcgagaccatcctggctaacacggtgaaaccccgtctctactaaaaatacaaaacattagccgggcgtggtggcgggcgcccgtagtcccagctactcgggaggctgaggcaggagaatggcgtgaagccgggaggcggagcttgcagtgagccgagatggcgccactgcactcaagcctgggcaacagagtgagactgtctcaacaaaaaaagaaaagaaaagaaacagagtagatggtcttagaaatgacaaggaatcccaatgagaggttctacctgggacaaaatagaaaaatgggaaatcataataagctctggaattggggcagtggtattgtttatttcctagttgtggcaaatctaatgtaaaatatggacattaaagaaaactgggtggagaacatagagaactttctgtactttttgcaacttttctgtaagtctaaatttattcgaaggccgggcgcagaggctcctgcctgtaatcccaaaacgttaggaggctgaagcaggtagatcacttgagcttggtagtttgagaccagcctgggcaaaaaagtgagacttcatctccattaaaaatttaaaaaattagctggctttgctggtgagcacctgcaccagactggttagcctgggcagcatagtgagaccccgtttctataaataagataaaaatcagctgggtgccaggcgtgatggctcatgcctgtaatcccagtgcttcgggaggccgaggggggcggatcacctgaggtcgagagtttgagaccagcctgaccaacatggagaaaccccgtctctactaaaagtacaaaaattagctgggcgtggtggcacgcgcctgtaattccaggtactagggaggctgaggcaggagaatcacttgaacctgggaggcggaggttgcagtgagctgagatcactccactgccccccagcatggctacagagcaagactccgtagcgggatattgcatgcatgtaatcccagctactctggagactgaggcaggagaatcatttgaacctggggggcggaggtcacagtgagccaagatcatgctattccagcctgggtgacagagtgagactacctctcaaaaaaaaaaaaaagaaaaagaaaaagaaaaagaaatgcatttacagaagctaggaaaatcaaattcagggaggaggctggagggcaaagagtgggtgtggccagactttaatccattctccatctgtggggtggtccctagggtataaaagagctccagggcccctgccctgcctttcatcctcaggatgggaagtcctcacagagttcagtaagtattggcttcccatggtgtttctgcacttcccccggggtcatatgagcctcacatttaggttgtaagactccccctaaaatctccaacactgagtcctctctatttgtagtcatgactccgacaccttgattctctgcccctaatactctttttttttttttgagacggagtttcactcttgttgcccaggctgcagtgcagtggtgtgatcttggctcactgcaacctctgcctcccggattcaagcaattctcctgcctcagcctcccgagtagctgggattacaggcatgcaccaccatgcccagttgattgtttttgtatttttagtagaggtggggtttcaccatgttggccaggtctcagactccaagcctcgagtcatccgccctcttcagcctcccaaagtgctgggtttacaggtgtgagccaccattcctggaccgcattattgattttttaaaatttttggattttgttcaattagtgattgagtctcactgtgttgcccagatgggcttgtctcccaggctggagtgcagtggtgagatcgtgactcacagtagcctcaacctccctcaccccagcgtcccgtgtagttgggatggcaggcatacaggaccatgcttagctaatttttttttttttttgtagggttggggtctcccaccattgtctaggctggtcatcaacacctgggcacaaacatcctctcaccccggcctctgagccactgcacccagtaggttttaggttcattttattttttatttaggtgtccacaaaggcagctttttccttttctttattttttaaagagacagggtctcactctgttgcccagggtggagtgcagtggccagatcttggctctctgcaacctctgccttccagactcaagtgatccaccttcgtctccagagtagctgggactataggtgtgcacaaacacacccagctgagttttaaatcttttgtagagaagggggcctcagtatgtttcccaggctggttttgaagtcctgtgctcaagcaatccttctgccttggcttcccaaactgctaggattacaggtgagccaccacaccgggcctgtccacgtaatttaaaaggtgctggacgtgtgcggtggctcacgtctgtaatcccagcactttgggaggctgaggtgggcggatcacgaggtcaggagttcgagaccagcctggccaatatggtgaaaccctgtctctactaaaaatacaaaaattagccaggtgtggtggcaggcgcctgtaatcccagcttctcaggaggctgaggcaggagaattgcttgaacccaggaggcggaggctgcagtgagctgatgatcgctccatggcactccagcctgggcaacagagcaagactaagaaaaaaaaagaaagaaaaagaaaaagaaaacaaagtaatgtaaaaggtgttattcaggctggggacccccaaagtgctgggattacaggcatgagccccagggcaggcctaggatttgcattacaaggctctgcattgttcctgagaactggagagagtgctcaatctacctttcgctattgagcaacattcagaagtcagttttaaatctcttatcttctgcatagaggatgtgcctgcagtttccaggtactggacaatacagggagggtacttctcagtctgtggcactcagccttgagggcactttctggtgccagaatgaaagtgctgtcatagctgaggtccaatgactgaggcgagcaccgaagaaacaccatgggggggagggggggcggggggctccaggagccactgcaggtaaaagctaaaccgtggtgcttgttctgcgccataaactggacttcagcccagctttaaggaaatgaccacggtctctgggttgtgaggctgggttccgtagcagctataatgcttggattcagggatagcctgggtcacaccattgccagagaagaggcaaccaatccagaccccaaaagcgggttcttggatctcttgctggaaagaatttcgaggcaagtcacaacacagcgaaagaagcaagctgaggcctgggctcaatcctcctgcttcgtcctcccaaagtgctgggattacacgcatgatcccctgtgccctgccaatatttggtaattataactggtggtcagcttacaatgtggctatttccagaccataagtaccaactctataggtgccttgtgagtgagtgccttgctacttcaagcagttactttcgtgtgttattaaaccagaggcctgctaagcctctgtgcctagtaaagattacaatttggaatgtcagcccccagctgtcctgtgtgattggcaggttaggtccttgttgaaccagaagcaactggccagtcgtacagatgcaactttcggaccagtagaaaatttctatgtcaacctggagacatagggattgtacctttctgataccctattagtaaataaatagtatttatttataaattatgtataatagtatttatctgaatatatcccaagcagcccaagtgtgttccagacataacatttttatttacatttaaatatcactaagattagagatacacatctaactcaggttttcaactagtcttaccattgaaagaactattgtggcaggacgcagtggcgcacgcctattatcctagcactttgggaggccgaggagggcggatcacaaggccaggagttcgagaccagcctggccagcatggtgaaaccccatctctactaaaaatacaaaaaaattagctgggcatgatggcacaggcttgcagtcccagctactcggtaggctgaggcaggagaactgcttgaacccggcagacggaggttgcagtgagccgagatcgcgccaccgaactccagtctgggcaacagagcaagacgcttgtcttaaaaaagagagagaaagaactacttgttctctgtaagccatgctggtttagccaaaatgctgcagttgtgtatggccagggacgttgaggctgcagtgagccgacggctgtgttgccgctctgcagtctgggggacagagcaagaacctgtctcaaaaaaacaagaagttagtgagacagacatgccgttctgttacttttccccttgctggttcaaagctaggtagttgccaattaaatgtaatcttgtagagcaaaaatgtttttcattttttgagacaggatctcactctattgcccagcctggagtgcagttgtgggaactcacagcaacctccacctcctgggtttaggcagttcttctgcatcagtctcccgagtagctgagactacaccggtgcccagagggcagtggccagatcttggctctctgcaacctctgccttccagattcaagtgagccacctccgcctcctgagtagctgggactataagtacgtaccaccatacccagttaatttttgcattttttgtagataagggggctaagtatgtttcccaggctggtttcgaagtcctgtgctcaagcaatccttctgccttggcttcccaaactgctaggattacaggtgagccaccacaccgggcctgtccacgtaatttaaaaggtgctggacgtgtgcggtggctcacgtctgtaatcccagcactttgggaggctgaggtgggcggatcatgaggtcgggagttcgagaccagcctggccaatatggtgaaaccctgtctctactaaaaatacaaaaattagccaggtgtggtggcaggcgcctgtaatcccagtttctcaggaggctgaggcaggagaattgcttgaacccaggaggcggaggctgcagtgagctgatgatcgcgccatggcactccagcctgggcaacagagcaagactaagaaaaaaaaaagagaaaaagaaaaagaaaacaaagtaatttaaaaggtgttattcaggctggggatccccaaagtgctgggattacaggcatgagccccagggcaggcctaggatttgcattacaaggctctgcattgttcctgagaactggagagaatgctcaatctacctttcactattgagcaacattcagaagtcagttttaaatctcttatcttctgcatagaggatgtgcctgcagtttccaggtactggacaatacagggagggtacttctcagtctgtggcactcagccttgagggcactttctggtgccagaatgaaagtgctgtcatagctgaggtccaatgactgaggcgagcaccgaaaaaacaccatgggggggagggggggcggggggctccaggagccactgcaggtaaaagctaaaccgtggtgcttgttctgcgccataaactggacttcagcccagctttaaggaaatgaccagggtctctgggttgtgaggctgggttccgtagcagctataatgcttggattcagggatagcctgggtcacaccattgccagagaagaggcaaccaatccagaccccaaaagcgggttcttggatctcttgctggaaagaatttcgaggcaagtcacaacacaatgaaagaagcaagctgaggccgggcgcggtggctcacgcctgtaatcccagcactttgggaggctgaggtggatggatcacctgagatcactatttttctttttattttctgagatggagtttcactcttgttgcccaggctagagtgcaatggcacgatctcggctcacagcaacctctgcctcccgggttcaagccattctcctgcctcagcctccggagtagctgggattactggcatgcgccaccacgcccagctaattttgtatttttagtagagacggggtttctccatgttggtcagactggtctccaactcccaacctcaggtgatccgcccgtctcggcctcacaaagtgctaggattacaggcgtgagccaccgcacccagcctgttttctgcatttttagtagagacagagtttcactatgttggccaggctggtctcaaactcccgaccttgtgatctgcccgcctcggattcccaaagtgctgggattacaggcgtgagccaccgcgcccggccttatttttctttttttttttttgagacaggatcccactctattgcccagcctggagtgcagtgcagtgatctcagctcactgcaacctctgcctcccgggttcaagcaattctcctgcatcagccgcccaagtagctgagattacagccgtgcctggcttatgttttgtgtttttagtggagatggggtgccaccatgctggccaggctggtcttaaactcctgacctcagttgatcctcccacctcagtctcccaaagtgctgggattacaggtgtgagccaccgcgcccagcaagcataagattttttgacacatggaggatcacttgctggatgtgcactgagaagtaatgtgcccatttcccagccacactctcccaaaggcttttacaggcgctgtccccgtgaggtggtagaacagaatgtcagaattcaacacattccaacactgtcttctgttgagctgtaggaggactgcctgtggagggacatgggttctatgctaccttgcaggttttccctggggcttgtgatcactgtctccttggtgacatgcaatctgggagtgctttctggagtctgataagaacatactggcacattgcctgtgacgtgtgggacccaggcattttcagtgctgaggtgagtccttgattgtaactgatggggactggtatcttaactccaggttactgaagactaggaatttcttgccttacagtaaaattgcaaagaagagtagcataagaggtagatcagaagactgcagaatagattaacaaatgaatgcccaaatgaggatgctaaacttggatttgcatcaagaagacagatattggtcgggcgtggtggctcacgcctgtaatcccagcactttgggaggctgaggcgggtggatcatcctggctaacacggtgaaaccccgtctctactaaaaaaatacaaaaaaattagccgggcgtggtggcaggcgcctgtagtcccagctgctggggaggctgaggcaggagaatggcatgaacccaggaggcggagcttgtagtgagccgagatcgtgccactgcacttcaccctgggcgacagagcgagactctgtctcaaaaaaaaaaaggacaggtattaggatagttttgaagcccacttgctcctatcatggcattgaagcatcagtttgctgccaatcactccttcttctgtgttcatagacaggactgtggaaatgtacacttggattctttcacaggtaatgctgagaaatttaaaaccaaaaacggccgggtgccgtggctcctgcctgtaattctagcactttgggaggctgaggcgggcggatcacaaggtcaggagttcgagagcagcctggccaatatggtgaaaccccatctccactaaaaatacaaaaattagcctggcatagtggcgggcccctgaagtcccagctactcaggagactgagtagacgaggagaatggcttgaacatggggtgcagaggttgcagtgagctgagatcgcaccgctgcactccagcctgggcaacaagagtgaaactctgtctcaaaaaaaaaaaaaaatttgaaattaaagtgtatgattagagtgcatgattggttctgactggatgtgtaacatgtgcatagccttctcataaatcaaaggtttttatgtgaaacctaccactagtgatgtaactgaatttgtgtaaatgctggtgtgtctgccttttcctagcaactccctgggcagcctgaggattctttgaggttattttttttcaagatctggctgggagcttctgcatgagtgctgtgtgaacgtcctccatctgcagtgtgaggacagcgaaccctagtgtgagttaaccacgtaggaagagtttgaagtcagacatgacattcagactgaggtcctcaaaactgaggggcattttctgtggtttgaaaggaaagtgcacccagttttggggatgtcaattgtgaatcctcatcataacccatccccagtcccccatcgcattgcaccacatggatgcacccagtggactggcctttgcttttctattgtttctttttctctccactgcaatcagctttctcacgttgaatgcattccattttctaagcgctctcctaggcaaaaatccctctaatgcaaagcaaaaatgtctgttatgcaacattgttctgagaccccaggaattgcagttaacttggctccttagtatgtgcttcctaaggcgggtggggtggctcgcgcctgtagtcccagcactttgggaggcaggcgaggcacttgaaaccctgtctctactaaaaatacaaaaattagctggacatggtggcatgtgcctgtaatcccagctacttgggaggtgcagacaggagcatcgcttgaacccaggaggcagaggttgcagtgagccaagataatggcactgtactgcaacctgggtgacagagcgagactcaaaaaaaaaaaaaagtgcttcctgtgaaggtttcctttcccttctgccccccataccagtccatctatttagtagatgtcctggtttctacccaggatatcatggaccaggggttctgtcttccagccttgagtacaatggtgcgactatagctcactgcagtctcaacctcctgggctcaagtgatcatcctgcctcagcctccaagtagctggtattacagatgcacgtgcccccattcccagaggttcttaaatttatgacaaaaacccagaagcttggctgaagcagcttgttggggcccacccacagattttgtttggtgccatagacctgggttgggatctggggagccatttttcttagtctcaatgtaaatgtctaagcattttctttttttctttctttttttttttttgagacagggtttcgctcttgttgcctaaactggagtgcagtggcacaatctcggctcactgcaacctctgcctcctgggttcaagtgattctcctgcctcagcctcccaagtagctgggattacaggtgtgcaccaccatgcccggctaatttttttttatttttttattttttttattttttgagatggagtcttgctctgttgcccaggctggagtgcagtggtgtgatctcggatcactgcaagctccgcctccttgattcatgccattctcctgcctcagcctcccgactagctgggactacaggtgcccgccaccacgcccagctaatttttttgtatttttagtagagacggggtttcactgtgttagccagggtggtctcggtctcctgatctcgtgatctgcctgcctcggcctcccaaagtgctgggattacaggcttgagtcactgcccctggccaattttttgtatttttagtagaaatggagtttcaccatgtttcctgcctatctctctatgtatttagacagggtctcactatgttgcccaggttggtctcaaactcctggactcaagcaatcctcctgcctccaccttccaaagtgctgggactacaggcttgagccatcctgcctgaccatttgagagttttttttttttgagatggagtctctctctgtcacccatgctgtagtgcagtagtgtgatcttgcctcactgcgacctctgcctcccgggttcaagcaattctcctgcctcagcatccccagtagctgggattacaggcgcccgccactacacccagctaatttttgtatttttagtagagacagggtttcaccatgttggccaggctggtctcgaactcctgacctcaggtggtctgcccacctccgcctcgcaaagtgctgggataagaggcgtgagccaccgtgcctgtcttcaacaatgatttctaattgcattttatggtggtgattgaacataatgtactttggtccttctccattgtatgcctcgtgtattatgtgtctcataacgtctgtcccgtcctatgctatgtgtgcatttgaatgttggggagggttcagtagatgtccattgagttggtttgcaaacttatttgaaacttctacttacttctgcctaattctgcttattattgagagtggactgctctgggatgccttttgtttgcactctgatttcagatggaccctgagaatgctcaagccccaaaccctccttgggaagtgaagctcaggctgtgatttcaagccagggggcgtttttctataactggatgaaaagcacctccagagcttgaagctcacagtttgagagcaatcgtctaaggaagttgatggcaatgttaatagttttttaaacaagcatgaaatcagattcctgtgtttacttctggatgctgttgatccaggaaatgtacttagaaaattcattttaacggaaatagtcataagcgtcttggtaatttcatgaagctacagtgagtaaattgcctgagaatttccctgcctgaaaggtcttcaggagtgtaatttttttttaatatagcttatttaatacaaatagagatgcggtctcactcttgcctagactggtgtgcagtgtcatgttcacagctcactgcagcctctcaacctccggggctcaagcatcctcctgcctcagcctcccaaagtgctggaattacaggtgtcagccaccactccctactcatacttgtatatttctctttaaattctgttgaggttttatggcctagcctgtggtctatcctggagaatatttgtgtgcatgacaatgtgtatatatatatatatatatatatttttttttttttttcttttttttgagatggagtttcactcttgttgccctagctggagtacagtggcatgaatctcagctcactgcaacctccgcctcccgggttcaagcgattttcctgcctcagcctcccgagtagccgggattaccctccaccacacccggctaatttttgtatttttagtagaggtggggtttcgccatattgaccaaggtggtcttgaactcctgacctcaggagtcccgcctcggcctctcaaagtgctgagattacaggcgtgagctaccctgcccaggctgaccatgtatattcctaatttttgtacttttttttttttgagacggagattcactcttgtggcccaagctggagtgcaatggcatgatctcggctcactgcaacctctgcctcctgggttcaagcaattctcctgcctcggcctcccgagtagctgggattacaggtgtgcaccaccacgcctgactgacaatatatattcttaaacagctcagattccattttggatcctcccatcaggactggaacttaggtgtactggaacttaggtgaacacttggctcaaaattcattgctgttctctataaatctagccagttctcttggttaaatttaaggtatgtatagtagtcgctgctttttctttcgggggacaaaactcaggaggattgcttcttgattcataagggcaacctgttgagattttcacgcaaggaacccgagatgttcatttaatgggcttataatttgggattccagaacacatgcaaacagggcaaatgaatgtttggctgtatctttatttttgtgttcatttcagcctggtcaaggttttagaatccaaggaaaccaataaacacccagagtgctggagcaagactgtctcctgctgtgaccctcaagatggaagcagtttctgttgtctgaaaggaaagaaagtgcttcctttttgagggttactgtttgagaaaagcaaccttgaggttgatgctgatgtttgtaacacacctgcagagtatacttataatcagacttgggtgatgtgaggttttgtttttactccaagatgagggtctccacccaggctggaatgcagttgcccttccaacctagaactcctgggatgaactggtcctctatgcctcagcctgccgagtagctgggactataatataggggtgtgccgccatatttggtagatttttcaattttttgtagagatggggcctcaccctggccaggatggtctcaactcctgagctcaagcaatcctacaggtgtgagccaccgtgcccattttaaagatagttgacatgatcaagcatagtgggacacacagccccagctactgcagaggctggggtgggagagtctcttgatttcaatgctataccgtgcactaatgacacctttgaatagccactgcactccagcctgggccaacatagcaagatcccatctcttaaaaaaaaatacattacatggcacctggttccagagacaccatttgtgttggtcaaacaatggcctcctataaatttagtttaatgaatccaaaccatgtttccttcattaagagagtaaataagcctccaagtctatccagtctttttgagacagagcttggctcttgtcactcaggctagagtgcaatggtgcaatctcagctcactgcaacctctgcctcctgagttcaaggagttctctcacctcagcctcccaagtagctagaatgacaggcgcctgccaccatgaccagctaatttttgtgtttttactagagatggggtttcaccatgtcggtcaggctggtctcgaactcctgacctccgtgatccacccacctcagcctcccaaagtgccgggattacagacgagagccaccacgcccggcctgtccagtcttgttctgcagtccccaatggggattttttttttcctgttcatttgtctttttattttaatctacttgtccctgacactgaaaatttttccttcctaacagcttaccatcatttctcagaatagacctgcttcctctgtgagaagcttatagttgattcaaccctcaaccactaatgccaacaaccctagtgagttcttttgactacagctggaccatttatcctgtttcctgtgggtagcggttccaatgtaccattccaacaggcaaaacctcgcctctgaatacaggttgcttggcaagatctaaaatgtttgctgtgcctaatataaactattgtaaagaaaatccatctcaatcacagtgacaaatgtcacatgagacaaaaccacagatattttcgcaaaaatagggtcctttagaaccctagaagggtctctctagtaacaggtgggatgttcagcagctcttgttgttgccacagtgagcgatgcctgttcgtccagcccttaacacctcttactccatggaagttctgcctgcactgctttatagaacacctcttgggttgaggtagagttggaggggacctcagtgtcccttgctgatgggatgtgcactgcttagcaagcgcacggaggtggagtgcatgggctctgagtttttattgggtaaatgcagccgaaatgtagtgtgcatgaacaggtcaaaaaattgcacatttgatttaatttttaaattttagagatgggggtctcactgtgtcacccagactaaactgggctgtgctcctatgcgtaccctagtagctgggacttcaggtgaatattaacccatgcataggcaaggagagaggaaggctctgacagtctgtgatctcccctcactgcaacctccaccctctggactgggaacgtcagggcactgcaccgatgcaggcaggatgagccgaggggaaaggagagccaggcatcactggctggggacattttgggtttgatctggatggagcaggtgtctcctggagagagagcccctgggattttcactctgctccctggctgtcttagtcatggaatctgacaacagagactcctgcccagggccacttcatttggtttctggaccccagtggtccttcctgcctggacttaggatcttttggggaagtttgggatctggcagggcatctgcataatccatagaaatccctgagagtcacttcccttggctgacatctccatgttcctacccattaccttccaaaggagacccttaactgaattaccaaagggggcttcccagagcagggaaacccggttaactttctatttcaggtcaacagtatacttgagatgtacttgaactagaaatgattggttgtttaggtgtgggcatttgtttttcctaacttagtctccaagaaaaaaaattattgaggttttacagcctagcctgtggtctatcctgaagaatgttcgtgtgtgtgacaatgtacattctttttttccccccagctctgtcaaatcttactgaggagcttttacggcctagcctgtggtctgtcctggagggtatttgtgtgtacaacaatgtatattcttaaacattatcttagattccattttggatgttcccatcaggactgtgtgtttctgtgctggaactcaagtgaacactggctcaacatccttagaaatccagcccaattctcttggttaaagataaggtatgtgtggtaggcattgctttttctctttggggacaaaactcaggaggattgccccttgatgaacaaggctaacctgctaagcctttgaagcaaggaactggagatggtcctttcaggggtttatgttctggattccataaaacatgcaaacaggggcaatgaatgcaccttttttatttttatttttatttttttttgagatggagtcttactcttgccagtctggagtgcagtggcacgatctcggctcactgcaacttctgcctcctggttcaagtaattcccctgcctcagcctcccgagtagctgggactacaggtacatgccaccacaggcggcaaatggttgtatttttagtagagacggagtttcaccatgttggccaggatggtcgtggtctcttgaccagcctcccaaagtgttgggattccaggcgtgagccaccgcgcctggccaatgaatgcatctttatttttgtgttcattttaatctggtaaggtaaattccaacaaaaaacccagagttttggagtgagaagatctcatgcagtcattctccaaaagaaagcactttctgttgtctgaaagcagagtgccttcttttggagcgttactgtttgagaaaaaccacgttgaagttgatgctgatcttggtaacacatttgcagagcgtgcttatcatcagacttgcatgatgttggggttctgtttttgtttagtttttttgcaacacagggtctcttgcccaggctggagtgcggtgacacttccaacctagacctcttgggctcagttggtccctgcccccaccccctcccccttttttttctcttgagacagtctctctctgtggcccaggctggagtgcagtggtatgttctctgctcactgcaacctctgcctcccgagtagctggtattacaggcacatgccaccacgcctggctaatttttgtatttttagcagagacggagtttcatcatgatggccagattagtcttgaactcctgaccttaggtgatccacctgcctcggcctcgcaaagtgctgggattacaggcatgagccactgtgcctggcccacaacgtatattcttaaatatcatcttagattccattttggttgctcccatcgggactgtgtgtccctgtgctggaactcaagtgaacacatggctcaaaatccattgctgttctctagaaatccagcccaattctcttggttaaatataaggtatgtgtggtaggctttgctttttctctttggagacaatactcaggagggttgccccttcgtgaacaaggctaacctgctgagcctttgaagcaaggaactggagatggtccttttaggggtttatgttctggattccagaaaacatgcaaacagggacaatgaatgcatctttatttttgtgtccattttaacctggtaaggaaaattccaacaaaaacccagagttttggagcgagaagatctcatgcagtcattctccaaaagggagcactttctgtttgaaagaaaacaaagtgcctccttttagagtgttactgtttgagaaaaaccacgttgaagttgatgctgatcttggtaacgcatttgcagagcgtgcttatcatcagacttgcatgatgttggggttctgtttttgtttagtttttttgcaacacagggtttctgttgcccgggcaggagtgcggtggcgcttccaacctagacctcttaggctagttggtcccccctactttttttgttgtttttgttcttgagacagagtctcactatgtgggccaggcgggcaggcagtgacacattctctgctcactgcaacctcggcctcccaagtagctggtattataggcacgtgccaccacgcctggctaatttttgtatttttagcagagatggagtttcaccacattggccaggttagtcttgaactcctgacctcaggtgatctgcccgcctctgctttccaaagtggtgggattacaggcatgagccaccctgctcggactgcagggtgtttttttttttttttttaattattatttgtatttttttgtgctgccaaagcaagcacttgtgtgtaggaattttgtttgtttgtttgtttgtttgtttgagatggagtctcattcttgtcgcccaggctggagtgcagtggcatgatctcggctcactgcaacctacgccttccgggttcaagcgattctcctgcctcagcctcctgagtagctgggatttcaggtgcatgccgccaccccggctaatttttgtccttttggtagaatcggggttttgccatgttggtccggctggtctcaaactcctgacctcaactaatccacctgcctcggcctcccaaactgctgggattacaggcatgagccaccgcacccggtgaggagttatttttaatgtgagcaaacagtatattcttttttttttttttcatagacagggtctcaacaatatatgatgtatatttaatcatatagtcttatcatgtatataatgtagtcatatgtacaccaaaccctgttctacacacggagaatactcttgtatcactttgggtatttatttacttgtttctttctgtgtttttcttgtttgtttgtttgttttgttttgagacaaggtctagctttatcacccaggctggagtgcagtggtgccatgtcgacttactgcaacctccacctgccacctcagcctcctgagtacttgtctacaggtgcgcaccaccacacccagctaacttttctattttttgtgcataaggtttcaccatattacccatgctggttgagctcgaactcctgagctcaagtgatcctcctgccttgccctctttaagtgctgggtttattggtgtgagccaccacgccccacccatacttgtgtatttctgtatttattgaggagcttatacagcataccctgtggtctatcctgcaggatgtttgtgtgtgagacagtgtatattcttgaacatagtagattccattttggatgctcccatcgggactgtgtgtccctgtgctggaactcgagtgaacacttggctcaaaatccattgctgttctctagaaatccagctcaattctcatggttaaatataaggtatatgtggtaggcattgctttttctctttggggacagaactcaggaggattgccccttgatgaacaaggctaacctgctgattctttgaagcaaaggactggagatggtccttttaggggtttatgttctggattccagaaaacatgcaaacagggccaataaatgcatctttttgttttgttttgttttgtttttgagatggagtctcgttctgtcacccaggctggagtgcagtggcacaatcttggctcactgcaagctcagcctcctgggttcacgccattctcctgcctcagctttccaagtagctggggctacaggtgcccaccaccacgctaggctaattttttgtatttttagtagaggcggggtttcaccctgttagccaggatggtcttgatctcctgacctcgtgatctgcccgcctcggcctcccaaagtgctgggattacaggcatgagccactgcgcccggccccaataaatgcatctttatttttgtgtccatttaaacctggtcaaggaagattcccacaaaaaatccacggtgctggagcaagaggatctcaggctgtgaccctctaaagggaagcgctttctgtggtcagaaagaaaagcaagtgcttccttttagagggttaccgtttgggaaaagcaatgttgaagttgatgctgatcttggtaaaatatttgcagagcgtgcttatcatcagacttggatgatggtggggttttgcttttgttttgttgtattccaagacaaggtccctgttgcccaggctggagtgcggtgacacttcaacctacatttcttgggctccggtcgtttttgtttgtttgtttgtttgtttgacagggagtctcactgtgtgtctcagcaatgcagtggcactatcttggctcactgaaacctcagcctcctgagtagctgggatcacaggtgcgtgcaaccacgcccatctaatttttgtattttttgcattttcagtagagacggggtttcaccgtgttagccaggatggtctcgatcttctaacctcgtgatccgcccgcctcggcctcccaaagtgctgggattataggcgtgagccaccgcgcccggccgagaaactaatcttttgagatgaactctgagatgtggattttagcttgtttgcagccaccaccactctagttttggaagattttcatcaccccgaagaggcttatactcatttgcagtcagtacccacccacctcttccacccagaccgtggcaacgactccccatctctctagctctggatctgcctcttgtaggccggtcacgtagaccaatcttgtatgggtgtccagttgaggataatgggttggtcctggttgtctgcaatgtgaatcttaccactgaagggtggtccctggagggaagcaggaggctgggagaactgggcggaacatcctttgggaatggagtggggcgggcagaccctgatgtctgggaagctcacaagggtggaagaccccatcttcctccctgagaactgcaaggtgaccctcctggggcactggaaggagtgaaggcctctgggctgggaacgtcagggcactgcaccgatgcaggcaggatgagccgaggggaaaggagaagcaggcatcattctctggggacattttgggtttgatctggatggagcaggtgtcttctgggagagagagcccctgggattttcactctgctccctggctgtcttagtcatggaatctgacaacagagactcctgcccagggccacttcatttggtttctggagcccagtggtccttcctgcctggacttgggatcttttggggaagtttgggatctggctgggcgtctgcataatccatagaaatccctgagagtcacttcccttggctgacatctccatgttccttacccattaccttccaaaggagacccttatctgaattaccaaagggggcttcccagagcagggaaacctggttaaatttgtatttcagattaacagtatacttgagatgtacttgaagtagaaatgattggctgtgggtgtcggcatttgttttttctaattttaaatatgggaccatcatgaatttgggtgtcactttgtgcaggggacgtgggaatcgctgtcatttttttttttttttaacatatgctgccagagaaggcacttaggtggagaaattactcttcgtgtgagcattcagtatatagaacttccttttctgggggcagtgtcttatatatgatacacattttatcatatcatcttctatagataatataatgattaacacaaaacactcttctacacacacagaatactcttgtatcactttgggttttttttccttcgtgtgtgtgtgtgtgtgtgtgtgtgtgtgtgtgtgtgtgtgttatgagacaaggtctggctctgtcacccaggctgcagtgcagtgttgcagtcttggcccatgccccaccgcagcctctggaatagctgtctgcaggccaggcacggtagctcaggcatgtcgtctcagcactcttggagaccaaagcaggctaatcacctggagtcaggagtttgagaccagcctggccaagatggtgaaacctcatttctactaaaagtacaaaaattagccgggcgcggtggctcacgcctgtaatcccagctcttagggaggcagaggcaggaggatagcttgagcccaggagtttgagacctgcctgggcaatacagtgagaccctgttctccacaaaaagaaaagaaaaaaaagaaaaaaaaattttaaaaatgcaaaattaggtgggcatcgtggcacgtgcctgtaatcccaggtaccccagaggctgagacaggagaattgctggaaacctggaggcagagcttgcagtgagctgagatcacggccctgcactacagcctgggcaacaaagtgagacttgtttcaaaaaaaaaaaaaaaatttattgaggagcttttatggcctagcctgtgttctatcctggagaatgtgtgtacaacagtgtatattcttaaacatcatcttagattccattttggatgcttgcatggggactgtgtgtccctgtactgggacttatgtgaacacttggcttcaaatccattgctgttctctagaaatccagcccaattctcatggttaaatataaggtatgtgtggtaggcattgctttttctctttggggacagaactcaggaggattgtctcttgatgaacaaggctaacctgctgagcctttgaagcaaggaactggagatggtccttttaggggtttatattctggattccagaaaacatgcagagagagtcaataaatgtatctttatttttgtgtccattttaaccaggtgaggaaaattccgtcaaaaaacccagacttttggagcgagaagatctcatgcagtcattctccaaaagaaagcactttctgttgtctgaaagcagagtgccttcttttggagcgttactgtttgagaaaaaccacgttgaagttgatgctgatcttggtaacacatttgcagagcgtgcttatcatcagacttgcatgatgttggggttctgtttttgtttagttgttttgcatcatggggtctctgttgcccaggctggagtgcggtggcgcttccaacctagatctcttgggctcaagtggtcccgtgcttgctttttttttttttcttgaaacagagtctctgtctctggcccaggcttgagcgcagtggcatgttatctgctcactgcaacctctcctcccaagtagatgggattacaggtgcacgtgccacgacgcctggctaatatttgcatttttagcagagatgcagtttcatcatgatggccaggttagtctccaactcctgacctcaggtgatccgcctgcctcagcctcccaaaatgctgagattataggtgtaagccacccagcctagcctccaattttttttaatgtgtgctgccaatgcaagcacatatgtgtaggaattatttttcatgtgagcacatagtatatggaacttaatttttattgatgtacggtctcaaaaatatatattttatcatattcttattatacatgtaacatagtcatatacacacaaaacactcttctatacacagagaatactctcgtatcactttgggtaattttttgtttgtgtgtgtatgtttttgttttttttttagataaggtctgggtctgtcacccaggctagagtgcagtggtgccatctcagcttattgcaacctccacctgccacttcagcctcttgagtagctgtctacaggcgcacaccaccacgcccggctaacttttctgttttctctacacatgaggtatcaccatgttgcccaggctggtctcaaactcttgaactcaagtgatactcctgcctcagcctcctaaagggctgggtttagaggtgtgagccaccacacctcacctgtacctgtgtgtttctgctcattttattgaggagcttttacagcctggcctgtggtctctcctggagggtgtttgtgtgtgtgacaatgcatattcttcaacatcgtagattccattttggatgcccccgtcgggactgtgtgtcactgtactggaactcgagtgaacacttagctcaaaatctattgctgttctctagaatccagcccaattctcatggttaaatataaggtatgtatagtcggcattgctttttgaaacaaggaactggagatggccctgataggggtttatgttctggattccagaaatcatgcaaacagggccaataaatgcatctttatttttgtgtccattttaacctggtcaaggaaaattccaacaaaaaatcaatggtgctggagcaagaagatctcagcctgtgaccctctagagggaagcgctttctgttgtctgaaagaaaagaaagtgcatctttttagaggattacagtttgagaaaagcaacgttaacgttcatgctgatctcggcaatacatttgcagagcgtgcttatcatcagacttggatgagggtgggcttttgttcctggtttgtttgttttctaagacggggtctcttttgcccaggctggagagcagtggcacttccaacctagctctcttgggctcaggtggtcctctttgcagggtcacgatctctgctcactacaatctccccttcccgggttgaagtggttctcccatctcagtctcctgtgttgctgggagtacaggcccatgccaccacgcccggctaatttttgtatttttagcagagatggggtttcaccgtgttgaccaggatggtctccatctcctgacctcgtaatccacctgcctcggcctcccaaagtgctgggtttacagtcatgaaccactgcacccggcctttgatcttaattttcaatatgagacccatcatgaatttgggcatcacctctgcacaggggccatggtgatctctgtcactccattcatttcttatgtgtggagcaaacatttatgtgtaggagtaattctttatgtgagcatacagtatatggaactttctttttttttgagatagggtctggaaaataaatgatgtacagccaggcgcatgagtatatgagcagtttttgtgtgtatacgacatgagcggtggctcatgcctgcaatatcaacactttggcaggttgaggcgagtggatcacttgaggtcaggagtttgagaccagcctgaccaacatggtgaaaccctgtctctactaaaaatacaaaaaattagccagctatggtggcgcacgcctgtattcccatctgctggggaagttgagggaggagaatcacttgaacggacagatggaggttgcagtgagccaagatcacgccaccacactccagcctgggcgagagaataagactgtctcaaaaaaaaaatatatatatacatatatatttatatagagagagagactctgtctcaaaaaaaaaaatatatatatgggtgtgtttgtgtgtatatatatattatatatgatgtatatttcatcatatagccatatatataattatatacacaaaaaatactcttctacacacagagatgactgatatcactttggggtggtttttgcttgtgtgttcttttaaatttttttttgcaacaagatctggctcagtcgcccaggttggagtgcagtgtttcagtcttggctcactgcaaccttcgcctcccaccccagcctcctgaattagtgtctacaggcatgtaccaccacacctggcctacatttgtatttttttacagacagggtttcaccgtgttgtacacgctggtcttgagctcctgagctcaagtgaatctcctgccttggcctcctgatgtgctgggattagaggtatgagccaccacacccaactggtacttgtgtattcctgttcaaattttattgaggagcttttaccacctagcctgtggtctatcctggaggatgtttgtgtgtgcgacaatgtatatagttcaacatcttagatcacattttggatgtttccaatgggactgtgtgtctccgcactggaactcaaatgaacacttggctcagaatccatttgctgttctctggaaatccagtccaattctcttggttaagtataaggtatgtctagtaggcattgctttttctgtttgagaacaaaactcgggaggattgtcccttgatgaacaaggctaacctgctgagcctttgaagcaaggaactggagatggtccttttcaggcgttttattctggattccagaaaacatgcaaacagggccactaaatgcatctttatttttctgtccatttaaacctggtcaaagaaaattccaacacgaaacccagagtgctggagcaagaagatctcaagctatgagtctacaaaggaaagcgctttctgttgtcagaaagaagagaaagcgcttcccttttgagggttacggtttgagaaaagcagtgttgaagttgatgctgatcttggtaatacatttgcagagcatgcttatcatcagacttggatgatagcggggttatgttttggttttgtgtttttctaagacagggtctccgttgcccaggctggagtgcggtggcacttccaacctagctctcttgggctcaagtgatcctctttttatttatttatgtattcatttttgagatggagcctggctctgtcacccaggctggagtagagtgggatgatctccactcattgcatcctctgcctcccaggttccagaaattctcccacctccgtgtcactagtagctgggattacaaatgctcaccactatgacctgccagtttttgtacttttggcacagacggggtttcaccatgtttgcggggctggtctcaactcctgacctcaagtgatctgcctccttggcctcccacagtgctggggattatagatataagccaccgtgcccggcccattcctgtctttttaatttaatctgctcgtccctgacatcgaaaatttttcttgcttaacagcttccacttatttctcggaatagacctttttctgcaggaagggtgtagttgattcaaccctcacccactcatgccaaccgtagtgagtgctgtgactgcagctgcactgtttatcctgttttctgcaggtaatttttccagtgtaccattccaacctgcaaaacctcacatttaaatgcaaatttcttggtaagctgtgaaatgttggctgtggctaatatgagaaacaagctattatagacaagatgaatctcagttgcagtgataaatgtcacatgggacaaaaccacagatactttcacaaaaaccttgaggaccctagaagggcctccctagtaacaggtgggatgcgcatccgctcttgttgccatagtgagtgatgcctgttcgtccagccctcaacacctttcactccgtggaagttatgcctgcactggtttacagaacctcccttgacttgacttgaggtagagttgaagggaacctcagtgtcccttgcagatgggatgtgcattgcttcgcaagagcacagaggtggagtgcatgggctttgagtttttattgggtaaatgaagctgaaatacagggtgtatgaccacgttatcaacgcacacttgatttaggttttgtattttagagacgggggtgtgagctgccaaagcaaggacttatgtgtaggaattattctttctgtgagcatacagtatatggaactttctttcttttgagacagggtctcaaaaatatatgatgtatggccaggtgcggtggatcacgcctgtaatcccagcagtttgggaggccgaggcgggtggataacctgagatcaggagggcgagaccagactggccaacatggtgaaaccatgtctctgctaaaaatacaaaaaattagccagggctggtggcgcacgcctgtagtctcagctactccggagggtgaggcaggagactatcactttgagtgtgtgtctttgtgtgtgtgtgtgtgtgtgtgtgtgtgtgtgtatgtgtttctagtttttacaagacacagcctgactatatcaccgaggctggagtgcagtggtgcaatgttggctcactgcaacctccacctgccaccgcagcctcctgaattagtgtctacaggtatgcaccaccacacctggctcacttttgtattttttgtacagatgaagcttcaccatgttgcccaggcttgtctggaactcttgagctcaagtgatcctctcacttcggcgtcctgaagtgctggggttagagatgtgagccaccgcacccaacaggtacttgtgtatttttttattgaggagcttttacagcgtagcctgtggtctctcctggaggatgtttgtgtgtgcgacaatgtacattcttcaacatcttagattccattttggatgcccccatgggtactacatgtgcctatactggaactcaagtgaacacttggctcaaaatccattgctgttctctagaaattcagttcgattctcttggttaaagataaggtatgagtagtaggcattgctttttctctttgggggcaaaactcaggaggattgccccttgatgaacaaggctaacctgctgagcctttgaaagaaggaactggagatggtccttttagggggtttatattctggattccagaaaacatgcaaacagggccaggaaaaatgcatctttatttttgtgtccatttaaacctggtcaaggaaaattccaacaataaacccagagtgctggagcaagaagatctcaggctgtgaccctccagagggaagtactttctgttgtctgagagaaaagaaagtgcttccctttggactgtttcggtttgagtaaagcagcgttgaagttgatgctgatcttggtaatacatttgcagagcacgctcatcatcagactcggatgatgttggggttctgattttgtttttctccaagacagggtctctgttgcccaggctggagtgcagtggcagttccaacctagctctcctgggcccaagagaccctctatttatttatttatttatttatttatttatttatttatttattcattcattcatttagagatggaatctggctctgtgacccaggctggagtgcagtaggacaatctccactcactgcaacctccatctcccaggttccagcagttctgccacctcagcctcccatgtagctgggattacaggcgcccaccaccatgtcatgctaatttttgtatttttagcagagatggggttacaccatgtttgctgggctgttctcaactcctgacttcaagtgatttgcctccctggcttcccaaagtgctggtattacaggcgtgagccactgtgtccggcctcaagtggtcttcctgagtcagcctcccaagtagttgggattacatggggcgtgacacaacacttggttcagcttttaatttttggtagagatggggtctctgttgctcaggacggtctcaactcctgagctcaagcgatcctacaggtgtgagccaccttgtcctgatgacccatttcaaagatagttgacttggccaggcatcatggggcacacagtcccagttactgcaggggccggggcgggagggtgctttgattttaaggctataccgtgcacagatcccacctttgaatagccactgcactccagcctgggccaacatagcaagatcccatttctttaaaaacagattacatagcacctggtcccacagatttcatttgggttggtcatgtcatacaatggcctcccatcaatttagtataatcaatccaaaccatggttccttcattaagagagtgggtaatcctccaagtccatccagtctattctgtaatccccagtgggtgtccgtattgatacaatttctttttgttcctgttcactcgtgtctttttagtgtaatctgcttgtccgtaacactgaaatttgtttttccccaacatcttgccatcatttctcggaatagacctgctttctctgcaggaagggtgtagttgattcaaccctcacccactaatgccaaccccagtgagttctttgactgtagctgccatgtttatcctattttctttgggtaacgattccaaggtaccattccaatgggcttaaaccttgcatctaaatgccagttacttgctaagatgtcaaatgtgtcttatattagctgtggctaatataagaaactgttgtagacaagatgaatctcagtcacagtgataaatgtagcatgcaacaaaaccagttgttttcacaaaaatcttgaggaccctagaaggggctccctcgtaacaggtggaatgcacagcagctcttcttgttgccatagtgagcgatgcatgttcttccagtcctcaacaccttttatttatttatttatttatttatttattttattattattatttttttttgagacagagtctcgctctgtcacccaggctggagtgcaatggtgtgatctcagctcactgcaaccactgcctcccgggttcaagcgattctcttgcctcagcctcacgtgtcgctaggactacaaccgtgcaccaccacgcccggctaatttttgtatttttaatagagacagggttttgccatgttggccaggttggtctggaactcctgacctcagttggtccacctgcctcagcctcacaaagtgctgtgaatacaggtgtgagccaacacgcccggctatcaacaacttttcctacgtagaaattattcgggcactggtttatagaacctcacgtgggttcacgtagaattgaaggggacctcagcgtcccttgcagatgggatgtgcaatgtatttgagatgtactcgaacattgctgttgaggtgtgggcatcttttgctttttcctaattttaaatatgggactagtctgggtatggtgacttccaccagtaattctagcactttgggaggctgagacaggaggatcacctgaggtcagttgttcgagaccagtctggccagcatggtgaaaccccgtctctactaaaaatacaaaaattagccgggtgtggtggcactcacctgtaatcccagctactcgggaggctgaggcaggagaatcacatgaatctgggaggcggaggttacagcgagcagagatcacaccgttacactcctgcctgggcaacagtgtgagactctgtctctaaataaataaataaataaaaataaaaataattaggtgaatatgggaccagcatggacttgggtgtcgcctttgtgcagtggccaggatattctatgtcatttaaatttttttatgtgtacttccaaagcaagcagttatgtataggaattattcttcctataagcatgcaatatttggaactttctttgagacagggtctcaaaaatacatgatgtatatttcattttatattcttatatattatgtacacacaaaatactcttctaaacacagagaatactccgatatcacctagggtgtgtgtgcgtgtgcgtgtgtgtgcgtgtgtgtgtggttcttttctgagacaatatctgcctctgtcacccaagatggagtgtggtggtgcaatctcggcttactgcaacctccacctcccacctaagcctgctgaattagtctctacaggcatgcaccaccacacctggctaacttctgtaatttttgtacacatggggtctcgccatgttgccggggctggtctcgagctcctgaggcaggtgatcctcctgcctgggcctcctaaagttcgaggagttagaggtctgagccactgggccccacttgtacttgtgtatttctgctcaaattttattgagtagtttttacatcctagcctgtgatctactctggagagtgtttgtgcatatgacagtgtatattcttcaacatcgtagactccattttggatgctcccttcgtgactgtgggtcctgtactggaactcgagtgaacacttggcttaaaatccattgctgttctccagaaatcctgcccaattttctcggttaaaggtacgtgtagtaggcattgctttttctctttggggacaaaactcaggaggattgccccttgatgaacaaggctaacctgctgattctttgaagcaaggaactggagatggtccttatagagttttatattctggattccataaaacatgcatacagggtcaataaatgcatctttatttttgtgtctattttaacttggtcaaagaaaattccaggaaaaaatccacggcatcagagcaagaagatgtcaggctgtgaccctcttgagggaagcactttctgttgtctgaaagaagagaaagtgcttccttttagaggcttactgtctgagaaaagcaacgttgtagttgatgctgatctttgtaatatctttgcagagcacgcttataatcagacttggatgatgttggggttttgtttttcttttgtttttttatctaagactgggtctctgttgcccaggctgaagtgcagtggcacaatcttggctcaccacaacctccgcctcccgggttcaagtgattcttctgcctcagcctcccaagtagctgggattataggactgcgccaccatgcctggctaattttgtatttttagtagagacagggtttctttaggagcttttaaggcctcccttgtagtctatcctggaggatgtttgtgtgtgcaacaatgtatattcttcaacatggtagattccattttgactgctctaatcaggactgtgtgtccctgtgctggaaatcaagtgaacacttggctgaaaatccactgctgttctctagaaatccagcccaattctcttggttaaatataaggtatgcatagtaggcattgctttttctttctggacacaaaactcaggaggatttccccttgatgaacaaggctaacctgctgagcctttgtaggaaggaacgggagatggtctttttaggggtctatgttctggattccagaaaacatgcaaacagagccaataaataggtctttatttttgtctctattttaacctggtcaaggaaaatttctacaaaaaacccagggtgctggagcaagaagatcccatgctgtgaccctctagagggaagcgctttctgttgtctgaaagaaaagaaagtgcatccttttagaggtttactgtttgaggaaagcaacagtgaagttgatgctgatcttggtaatacatttgcagagcatgcttatcatcagacttggatgatggtgggattctgtttttattttgtttttttttctaagacagagtctctcttgcccaggctggagtagggtagcacttccaacgtagatcttttaggctcaaacggtcctcttttttttttttttttttttgaggcggagtcttgctctgtgacccagacgagagtgcaatggcgcgatcttgtgtgcaagctcacctcctgagttcaagcaattcttctgccccagcctcccaagtagctgggactacaggtgcctgccaccacttccagctaatttttgtatttttagtagagacagggtttcaccacgttggccaggctggtctcaaactactgacctcaagatccacccacctcagcctcccaaagtgctgggattacaggcgtgggccattgtgcccagcggtcctcttttttgagatggagtcttgctctgtgacccaggctggagtgcagtggcaggaacttcgctccctgtaccctccacctcccagattcaagccattctctcctgagtcagcctccctagtagctgagatcgcagacatgagccaccatacccagctaatttttgtatttttattatttatttatttactcatcgatttttgaaacagagtcttactccgtccatcaggctggaggtcagtggcacaatcccacgttcaagcaattctcctgcctcatcctcccgagtagctgggatcacaggcgcacaccaccacgcccggctaatttttgtgttttttttgtttgttcgttttttttttttttgtagagacagggtttcaacatgttggccagcccagtctccaactcctgaccttaagtgagcccatacacaatcaagaagagagcgagacctgttctttttttctgtctttgactatttgagacagtcttgctctgtcacccgagatggagtacattagtgtgatcttggctcactgcaacctctgcctcctggactcaagcaattctcttttttttttttttggagaaagagcctctctgtgtctcccaggctggactgcagtggtgtgatctcagctcactgcaacctcagccttccaagtagctgggattgcagacatgtacccccataccagctatatatatatatgtattttagacacagtttcaccatgttagccaggccattcttgaatcctgacctcaggtgatttgccgacgtaggcctcccgaagtgctgggattacaggtatgagccactgcactcagccttttttcctaattttgaatatgggacccattatgaatttgggtgtcacctatgtgcgggggctatggaaatctctgtcaccccattcatttgtgtgtgctgtcaaagcaccaatatgtgggaattatgctttatgtgagcatatagtatatggaactttggtttttttttatacagggtctcaaaaaaaaatgagtatatttcatcacaatgttctgtgtataattccatacacacaaaatagtcttctatacacagagaacactcttatatcactttggagttgtttttgtttgtgtattttgttttaatttttatgagacagggcctggctatgtcgctgaggctggagggcagtggtgagatcttggctcactgcaacctccacctgccacctcagcctcctggattagtgtctacaggcaggcaccaccacccctgggtaagttctgtatttttggtactgatgaggtttcagcacgttccacaggctggactcttaactcctgcgatcaagtgatcctcccgctgttcaaattttactgaggagcttttaaggcctcgcctgtggtctgtcctgtagtgtccctgtcctggaactcaagtgaatacttggtttaaaattgattgctgttctctagaaatccagcccaattctcttggttaaatataaggtatgtgtagtaggcactgctttttctttctggaggcgaaactcaggaggattgccccttgatgaacaaggctaacctgctgagcctttgaagcaaggaactggagatggtcgttttaggggtttatgttctggattccagaaaacatggaaacagggccaataaatgcatctttatttttgtgtccattttaacccagtgaaggaagatttcaaccaaaaacccacggtgctggagcaagaagatctcaagctgtgactctccagagggatgcactttctcttatgtgaaaaaaaagaaggcgcttccctttagagcgttacggtttgggtaaagcaacgttgaagttgatgctgatcttggtaatatatttgcagagcatgcttataattaagacttggatgatggtgggtttctgttttgttttttgttttaaatcagagtctcactctgtcacccaggctggagtgcaatggcgcaatctcggctcactgcaacttccccctcctgggttcaagtgattctcctgcctcagcctcctgagtagttaggattacagacatgcgccacctcacccggctcagtttttgtatttggtggagatggggtttcaccatgttagtcaggctggtcttgaactcctgatctcaggtgatccacctgcctcagcctcccaaagcattgggattacaggcgtgagccaccacgccaggcctgttcaacatcttagatttcattttggatgttcctgtgaggactgcgtgtccctgtgctggaactcaagtgaacgcttggctcaaaatccattgctgttctctagaaatccagccaaattctattggtgaaatataaggtatgtctagtagtcattgctttttctctttggagacaaaactcaggaggattgccccttgatgaacaaggctaacctgctgagcctttgaaacaaggaactggagatggtcctttcaggggtttatattctggattccagaaaacatgcaaacagggccagtaaatgcatctttatttttgtgttcattttaacctggtcaaggaaaattgctacaaaaaacccagggtgctggagcaagaagatctcatgctgtgaccctctagagggaagcgctttctgttgtctgaaagaaaagaacgcgcttccctatagagggttaccctttgagaaaagcagcattgaagttgatgctgatcttgctaatacatttgcagagcatgcttatcatcagacttggatgaaggtggggttctgttttttttttttttctaagacaggatctctgttgcccaggctggaatgtggtggcacttccaacctagctctcttgggctcaaatggtcctctcttttgggatagagtcttactctgtgacccaggctggagtgcagtggcgtgatctcagcttactgccacctccacctcccagtttcaagccgttctcctgcctcagattcctgagtatctgggattataggtacctgacaccacgcctggctaatacttgcatttttctttcttttttcttttcttttttttttttttttttttgagatggagtcttactctgtcaccaggctggagtgcagtggtgcgatcttcgcttatttcaacctccgcctcccagtttcaagtgattctcctgcctcagccacccgactaactaggatttcaggcatgcaccacacgcctggctaattttttgtatttttagtagagacagggtttcaccatgttggtcaggctggtctcgaactcccgacctctggtgatcttcccgccttggcctccgaaagtgctgggattgcaggcattagccaccccgcccggccattatatattcttatatatataataccatatacgtgcaaaatactcttctacatgaagagaatactcttatatcactttggggttttttttgtttgtttgtgtgtgtgtgagtgtatgttttatttgtttttggataaggtctggctctgtcacccagtctagagtgcagttgtgccatctctctcagctcactgcgacttctacctcccacctaagcctgctgaattagtgtctacaggcatgcaccaccacacctggctccgttttgtattttttatacacatgggcttacaccatgttgccgagactggtctcgaacacctgagctcaggtgatacttcagtttcagcctcctaatgtgctgggattagaggtgtgagccaccgtgccccacttgtagttgtgtgtttctgttcaaattttattgaggagtttttagggcctagcctgtgatctaccctggaggatgtttgtgtgtacaacaatgtatattctttaacatcgtagattccattttggatgctcccatcgggactgtgtgtccctgtgctggaactctggtgaacacctggctcaatatccatttctcttctctagaaatccagcccagttctcttggttaaatataaggtacatatgtctatgaggcattgcttttgctctttgagaacaaaactcaggaggattgctctttgatgaacaaagctaacctgctgatcctttgaagcaaggaactggagatggtccttttaggggtttatattctggattccagaaaacatgcaaacagggccaataaatgcatctttgtttttgtgtccattttaaccgggtgaaggaaaattccaacaaaaaacccagagtgttggagcaagaagatctcatgctgtgaccctctagagggaagcactttctcttgtctaaaagaaaagaaagcgcttctctttagaggattactctttgagaaaagcaacgttgaagttgatgcttatcttggtaataaatttgcagagaatgcttataatcagacgtggatgatgttggtgtttcatgtttgttttgttttgtttttaatacagggtgtctgttgcccaggctggagtgtggtggtccctctccaacctagatctcttgggttcaagtggccctcttttttgggtcagagtcttgctctgtggccctggctggagtgcagtgtcaggatctctgctcactacaacctctgcctcctgggtaaaagcgattctcctgcctcagcctcccaagcaactgggattacaggcatgtgctaccatgcccggctaatttttgtaatttcctttatttatttttgagacagagtcttactctttcgcccaggctggagtgcagtggtgcaatctcggctcactgcaacctccaactcccacctcagcctcctgaatagctgtctacaggcatgcaccaccacacctggctaacttttgtattttttgtacagacatggtttctccatgttgcctgggctggtcttgaactcctgaactcaagtgatcctcccacctcggcctcctaaagtgctgtgattagaggtatgagccaccgtgccccacctgtacttgtgtgtttctgctcaaattttattggggagcttttatggtatagcctgtggtctctctggagaatgtttgtgtctatgacaatgtatattcttcagtatgttatgttccattttggatgcttgcatggggactgtgtgtccctgtactgaaactcaggtgaacacttggctctccgtccattgctgttctctagaaatccagcccagttcccttggttaaagataaggtatgtctagcaggtattgctctttctcttgcagacaaaactcaggaggattgccccttgataaacaaggctaacctgctgattctttgaaggaaggaactggagattgtccttttaggggtttatattctggattccagaaaacacacaaatagaaaacagggcaaataaatgcatctttcttttcgagtccattttaacctggttaaggaagattccaacaaaaaatccacggtgccacagcaagaagatgtcaggctgtgtccctctacagggaagcgctttctgttgtctgaaagaaaagaaagtgcttccttttagagggttaccgtttaagaaaagcaacgtttaggtggatgctgatcttggcaataatacatttgcagagcatgcttatcatcagagttggatgatggtggggttctgtttttttgtttttttttttctgagacagagtgtctattgcccaggctggagtgcagtggcacttttaacctagatctcttgggctcaagtggtcctgttttttgggataatctcacactgtgacccagtccggagtacagtggcatgaacaccactcattgcatgctttgcctcccaggttcaagtcattcttatgacccagcttccagagcagctgggattacaggcatgagccaccacactggctaatttttgtatttttaatagagatggggttcaccatgttggccaggctggtctccaactactgacctcatgatccacccacgtcggccttccaaagtgctgggattacagacgtgagccactgtgcccggccaacacagagaatactcttatatcactttggggttgtttctgtttgtgtattttttaaatattttttgagacacagtctggcgctattacctaggttggagtgcagtgttgtgacctcggctcacagcaacctctacctcccagctgagcctcctgagttagcatctgcaggcatgaaccacaacacctggtaacctttgtatttttggacacatgaggtttcaccatgttgcccaggctagtcttgaactcctgagctcaagtaatcctcctgcctccgactcctaaagtgctgggattacaggtgtgagccactgcaccccacctgtacttgtgtatttctgttcaaattttattgaggagcttttacggcctagacagtagtctatcctggagaatgtttgtgtgtatgacaatgtatattctttttttttatttttattttttggagacggagtctcactctgtcacccaggctggagtgcaatggcatgatctcggttcactgaaacctccgcctcctgggttccagcgatcctcctgtctcagcctgctgagtagctaggattacaggtgggcgcctggctaatttagattccattttggatgctcccatcgggactgtgtgtccctatgttggaactcaggtgaacgcttggctcaaaaatccattgctgttctctagaaatcctgcctaattctcttggttaaagataaggtatatgtagcaggcattgctttttctctttggggacaaaactcaggaggattgcgccttgatgaacaaggctaacctgctgagcctttgaagcaaggaactggagatggtccttttaggggtttatgttctggattccagaaaacatgcaaacagggcaaataaatgcatctttattttgtgtccattttaacctggtcaaggaaaattccaacagcaacatcaaaaaaccagtgttggagcaagaatatgtcatgctgtggccctccagagggaagcgctttctgttgtctgaaagaaaacaaagcgctcccctttagaggtttacggtttgagtaaagcagcgttgaagttgatgctgatcttggtaatacatttgcagagcgtgcttatcatcagacgtggacgatggtggggttctgttttggttttgtttttttctaagacagggtctccgttgcccagactggagtgcggtggcacttctacctagatctcttgggctcagatggtcttctttttatttcatttttttaattgtttgagatggagtctcactctgtcacccaggctggagtacagtggcaggatctccacaactacagcctcccaggttccagacattctcccacctcagcctcccgagtagctggaattataagcacccaccgccatgccctgctttttgtatttttagacaagaaagggtttcaccatattggccaggctcatctcaactcttgcccttaagtaatcctcctccctggcctcccaaagtgctgagattacaggcgtgagccaccgcgcccagcctcaagtggtcctcttgagtcagcctctcaagtagttgggactacgtggggcgtgccaccatacttggctaagtttttaatttttggtacaattggggtctctttttcccaggatagtctcatctccacagcttatgtggtcctacacgtgtgagccacctcgtcttgatgacccatttcaaagagagttgacatggccaggcattgtggggcacacagtcccagccactgcagaggccagggtcggagggacctttgatttccagactgtaccatgcactgatcacaccttcgaatagccactgcgctccagcctgggccaacatagcaagatcccatctctttaaaaacagattacatggcacctggttacagaggctccatttgggttggttatttgaaatgggtctcccatcaatttagtgtaatcaatcgaaatcatttccttcattaagagagtaagtagccggggcatggtgcctcatgcctgtaatcccagcactgtgggaggcaaaggcaggcggatcgcctgaggtcaggagttcaagaccagcctggccaatatggtgaaaccctatcactactaaaaatacaaaaattagccgggtgtggtggcgtgaacctaggaggctgaggttgcagtgagctgagattgcaccattgcactccaacctgggcgactgagctggacttaaaaaaaaggtaagtaagccttcaagtctatccaatcttaatttgtaatctcaaatggatgtccatattaacaaaattttcttgtttttcctgtttgtgtctttttagtttaatcttcttgtccttgacactgaaatttttttctctccaacaacttgccgtcgtttctcggaatagagctgctttctctgcaggaagggtgtagttgattcaaccgccacccactcacgccagccccggtgagttctttgactgcagcttccctgattatgctattttcttcgggtaatgaacccaaggtacctcgcatttaaaggctagttgcttggtaagctgtgaaatgttggctgtggctaatatgagaaacaaactatggtagacaagatgagtctcagtggcagtgataattgtcacatgggacaaaaccacagatacttttcacaaaaaccttgaggaccctagaagggcctctctagtaacaggtgggatgcgccgcagctctcgttgttgccgtagtgagcgatgcctgttcgtccagccctcaacaccttttactccgtggaagttatgcctgcactggtttacagaacctcccttgacttgggttgaggtagagctgaagggaacctcagtgtcccttgcaggtgggatgttcactacgtagcaagagcacaaaggtggagtgcgtgggctttgagtttctattgggtaaatgaagctgaaatgtagggcacatgagcacgtcatcaatgtacaattgatttaatttttgtattttagaaacggaggtctcgctatgccgcccagggtagaatgtgctctctccctctcctcttcctagtatctgggactacaggtgaatattttaatctatgcacaggcaagaagagggcaaggagggttcttttgttctgtctttgactttgtgaggcagtgtcactctgtcactcaagctggagtgcaataatgtgatctcggctcactgcaacctctgcctcctgggttcaagcaatttttttttttttttttttttgagtcagtatctcactctgtccctcagggtggagtgcagcggcccagtctctgctcctgcaacttctgactcccaagtaggtacaattgcagacacgtgtcaccacgcttggcaaaattttttttgtatttttagagctgggattttaccttgttggcgaggctggtctggaactcctgacctcaggtgactcgcccaccttggcctcccaacaagttatgctgatcttggtaataacttcgcagagcgtgcttccatcagacatggaggatggtggggtcctgttttgttgttgttgtttttctaagatagggtctcttgcccaggctggagtgtgttggcacttccaacctaggtgtcttgggctcaaatggtcctcttttttcggacagtcttgctctgtgacccatgctggagtgtagtgacgtgatctcagctcactgcaacctccacctcccagttttaggcagttctcctgcctcacattcctgagtagctgggattataggtgcctgacaccatgcctggctaatatttgcatgttatttattcatgtatttatttgttttgagatggagtctcactgtcactcaggccagagggcagtggcaggacctcggctcactcaaacctttgcctctcaggttcaagcaagtcttctgcctcaacctcctgagtagctggaatcacaggcacccgtcaccacgcccggttacttttgtattttttttttcaccatgttggccaggctggtctgaaacccctgacttcatgtgagccgcccgcctcagccacccaaagtggtgggattacaggcataagccactgcgcccggccaacaatgtatatttttcaacatgggagattcagttttgaatgctcccatcgggactgtgtgtccctgtgctggaactcaagtgaacgcttggctcaaaatccattgctgttctctagaaatccagcccaattctcttggttaaatgtaaggtatgtgtagtaggcaatgctttttctggagacagaactcaggaggattgtccctcgatgatctaggctaacctgctgagactttgaagcaaggaactggagatggtccttttagggttttatgttctggattccagaaaacatgcaaacagggccaataaatgcatcctcatttttgtgtccattttaacctggtgaaggaaaattccaacaaaaaacccacagtgctggagcaagaagagctcaggctgtgaccctctagagggaagcactttctgttgcttgaaagaagagaaagcgcttccttttagaggattactctttgagaaaaacaacattgaagttaatgctgatcttggagatcatgcttataatcagacttggatgatgttggggttttgtggggtttttttggttttttttcctaagacagggtgtctgttgcccaggctggagtatggtggcccctccaacctagatctcttgggttcaagtggccctcttttttgggacagagtcttgctctgtgaccctggctggagctcagtatcaggaactttgctcactgcaacctctgcctcccaggttcaaatgattctcctgcctcagcctcccgagcagctgggattacaggcatatgccaccacgcccagctaatttttgtattattgttatgtatttattttttaacttattcattttagagacagagtctcactctgtcgcccaggctggagtgcagtggtgcgatctcggctcactgcaacctccaactcccagctcagcctcctgaatagctgtctgcaggcatacaccaccacacctggctaacttttggtttttttgtacagatgtggtttccccatgttgcccaggttggtctcgaactccttagctcaggtgatcttccaccttggcctcctaaagtgctaggattagtggtgtgagctgttgtgccccacctatactcgtctgtttctgctcagattttattgaggagcgtttacagggtagcctgttgtctaccctgcaggatgtttgtgcctacaacagtgtatattcttcaacatcttagattccatttcggatgcccccatgaggactgtgcgctcctgtactggaactcaagcgaccacttggctcaaaatccattgctattctctagaaatccagcccaattctcttggttaaagataaggtatgtgtagtaggcattgccttttctctttgggaacaaaactcaggaggattgcccgttgatgaacaaggctaacctgctgattctttgaagcaaagaactgcagatggtccttttagggatttatgctctggattccagaaaacatgcaaacagggcaaataaatgcatctttatttttgcgtccattttaacctggtcaaggaagattcccacaaaaaatccacagtgccagagcaagaagatctcaggctgtcgtcctctagagggaagcactttctgttgtctgaaagaaaagaaagtgcttccttttagagggttaccgtttgagaaaagcaacattgaagttgatgctgatcttggtaatacattttcagagcatgcttatcatcagagatggatgatggtgggcttctgtttttgttttgattttttcttttttttttttttgagatggagtttcgttcttgctgcccaagcactagtatgtaggaattattctttatgtgagcatatagtacatggaactttgtttttttgagacagggtctccaaaatatatacatgttatcatataatcttctatgtataattatattcacacaaaatagtcttctgcacacagagaatactcttatatcactttggggttgtttttgtttgtgtattttttttttttttaattttttttgagacaccatctggctctattgcccaggctggagtgcagtgttgtgacctcaactcactgcagcctctacctcccacctcagcctcctgaattagtgtctacaggcatgaaccactacacctggctatcttttgtatttttacagatgaggttttactatgttgggcaggctagttttgaactcgagctcatgtaattttcccgccttcgactcctaaagtgctgggattagaggtgtaagccactgcactccacccgtacttctgtacaaatgttattgaggagcttttacggcctaggcagtgctctatcctggagaatgtttgtgtgtaagacaatgcatattctttttttctttcctgtcacccaggctggagtgcattggcacgatctcgtctcactgcaacctccgcctcccgggttcaagcaattctcctgcctcagcctcctgagtagctgggattacaggtgggcaccaccacgcctggcaaatttagattccattttggatgctcccatcatgactgtgtgtccctgtgctggaactcaagtgaccatgtgactcaatccattgctgttctctagaaatccacctcaattctcttggttaaaggtaaggtatgtgtagtgggcattgctttttctccttggagacaaaacttaggaggattccccttgatgaacaaggctaatctgctgagcctggagattgtccttttagaggtttatgttctggattccagaaaacggtcaaacagcgaataaatgcatctttatatttgtgtccatcttaacctggtcaaggaaaatttcaacaaaaatcccagatggctggagcgagaagatctcatgctgtgactctctggagggaagcactttctgttgtctgaaagaaaacaaagcgcttctctttagagtgttacggtttgagaaaagcaacgttgaagttgatgctgatcttggtaatacattcgcagagcatgcttatcaggcttggatgacggcagggttctgttttggttttatttttttccaagaccagtctctgttgcccaggctggagagggaggggttgcactccaaactagatctcttggggtcatgtcttgctctattattattattaattcttatttttgtgtgtgtgtgagacggagtctcgctctgtcaccaggttggagtccagtggcggaatctcagctcactgcaacctccgactccgtggttcaagcgattctcctgcctcagcctcctgagtagctgggattacaggcacgcaccgccatgccgagctaatttttgtatttttagtagagaccgggtttcaccacgttggccaggatggtctcaaactcctgacctcatgatccacccgcctcggcctcccaaagtgctgggattacaggtgtgagcctccgtgcccagcctgttattttattttgttttattttatttattttattttattttgagatggagactggctctgtcgcccaggctggaatgcagtggcaggatctccactcactgtaactcccacctctgtcgcccaggctggagtgcagtggcaggatctccactcaccgtggagttccagtgattctttcaccttagcctcgcaaatagctggtattacaagcacccaccaacacaccctgccaatttttgtatttttagacaagaaagggtttcgccatgttggccaggctggtctcgactcctgaccttaagtgatccacctccctggcctcccaaagtgctgggattacaggcgtgagccaccacgtccagcctcaagtggtcttcttgtcagcctcgcaagtagttgggctcaggttttaatttttggtagagatggggtctcttttgcctgggatggtctcagctgagcttaagtgatcctaaatgtgtgagccaccttgtcccatttcaaagataggtgacacggccaggcatcctgggacacacagggtcccagttactgcaaaggctagggtgggagggtcctttgattttaaggctataccatgcactgatcacacctttgaatagccactgcactccggcctgggccacatagcaagatcccatctctttaaaaacgcagattacatgccatctggttcctgaggctccatttgggttggtcacttcaaatacaggcctttcatcagtttagtttaatcaatccaaaccatgtttccttcattaggagagtaagggccaggtgtgtaatccaagcactttgggagactgaagcaggcggatcaggaggtcaggagttcgagaccagcctgaccaatatggtgaaaccccgtctctactaaaaatacaaagattaagtgggcgtggtggtgcgtgcttgtaatcccagctactcaggaggctgaggcagcagaatctcttcaacccaggaggcggaggttgcagtgagccaagatcgcgcaggtgcactccagcctgggcgacagagcgaggctccatctcaaaacaaaacaaaacaaaaaatataggcctccacatctatccagtctattctgtaatcccaatggatgtcaatattaatacaatgttcttattttttctatttatttgtatctttttagttgaatctccttgtccctgacactaaattttttttatttttatttatttattttttttgaaacagtcttgctctgtcgcccaggctgcagtacagtggcgcaatctcggcttactgtagcctctgtctcccgggttccagtgattctccttccccaactcccgggtaactgggattttcaggcacacaccaccaccccagctaatttttttgtacgtttagtagagacagggtttcaccatattgggcaggctggccttgaactcctgaactaaggtgatccgcccacctcggcctcccaaagtgctgggattagggataaggctaacctgcttattctttgtagcaaggaactggagatggtcattttaggggtttatgttctggattccagaaaacatgcaaacagggccaataaatgcatcctcatttttgtgtccattttaacctgggcaaggaaaattccaacaaaaaacccagagttctggagcaagaagatctcatgctgtgaccctacaaagggaagcactttctcttgtccaaaggaaaagaaggcgcttccctttggagtgttacggtttgagaaaagcagcgttgaagttgatgcttatctcggtaatacatttgtagagcatgcttatcatgaggcttggacgatggcggggttctgttttggttttgcttttttattctaagacaggatctctgttgcccaggctggagtgcggtggcacatccaacctaggtcttttggattcaaatggtttttttagcggacagagtctctctatcacccaggctgaagtgcagtggtgtgatctcggctcactgcaacctccacctcccaggttcaagcgagtctcctgcctcagcttcccaagtaggtgagattacaggtgcccatcaccacacctggataatattttcattttttaaaattcatttatttatgtttttgagatggagtctcactgttacccaggctggagggccgaggcgtgatctctgctcagtgcaacctctgcctcccggattcaagcaattcttctacctcagcctcctgagtagctagaattacgggagcccaccaccacacctggctactttttgttttttgttttttgttttttttttagtagagatgggatttcaccatgtttgccaggctggtctcaaacccctgacctcaagttagccaccggcctctgcctcccaaagtgctgggattacaggcatgagccaccacgcctggcctaatttttatattttcagcagaggcggggtttcaccatgttggccaggctggttgcgaactcctgacctcaggtgatctgcccacctcagcctcccaaagtgctaagattacaggcgtgagccaccacacatggccattaacaccttttagtccatggaaattattctggcactgatttataaagcctcatgtggggtcaggtagagtcaaagggggacctcagtgtcccttgcagatgggatgtgctcagcaagagcacggaggtggagtgcatggggtttgagttttcactggggaaatgaaaccaacatcttgggtgcatgaccaggtcatatatgcagtcatatatgcaatatgcatggtggtgggtgcctctaatcccagctactcaggaggctgacgcagaagaatcgcttgaacccaggaggcagaagttgccatgagccgagatcccaccaccgcatccagcctgggcggcagagtgagactccgtgtcaaaaaaaagaagatctcaggcagtgaccctctagatggaagcactgtctgttgtataaaagaaaagatcgtgcatccctttagagtgttactgtttgagacaagcaacgttgaagatgctgctgatcttggtaatacatttgcagagcgtgcttatcatcagacttgcatgatgtcggggttctgtttgtgatttgaaatttttccaagacaggctttctattgcccaggcgtgggtggatagcaccttccaccaagatttcttgggcttaagtggtcctctttttattttttgattttttgagacacactcttgtttcgttgggagtgcagtagcaggatctctgctcaccggaaactccacctctcgggttccagtgattctcccacctcagcctgccgaattgttgggaattcaggcatcaggcacccaccatcgtgtcctgcactcttgctgcccatcctggagagcactggcatgatctaggctcactgcaacctccgcctcctgggttcgagtgatgcttctgcctcagcctcccaggtagttgggattacaggcacctactgccccacccagctaatttttatgtttttagtagagacgggtttcaccatgttggccaggctagtcttgaactcccgctttcaggtgatccactagcctgtggtctatcctggaggatgtttgtgtgtgtgacaatgtatattcttcaacatcttagactccattttggatgctcccatcggaactatgtatccctgtgctggaactcaagtgaacactcagctcaaagtccattgctgttctctagaaatccagcccagttctcttggttaaatataaggtatgtgtagtaggcattgctttttctctttagaggcaaaactcaggagggttgccccttgatgaacaaggctaacctgcagagcctttgaagaaaggaactggagatggtccttttaggggtttatgttctggattctagaaaacaggcaaacagggccaataaatgcatctttattgttgtggccattttaacctggtcaaggaagatttcaacaaaaaacccagagtgctggagcaagaagatcccatgctgtgaccctccaaagggaagcgctttctgtttgttttctcttaaacaaagtgcctccctttagagtgttaccgtttgggaaaagccacgttgaagatgatgctgatcttggtaatacatttgcagaccatgcttgtaatcagacttggatgatgttgggagtctgtttttttgtttgtttgtttggttggtttttttgtttgttaggtttttgttttttgttttggtgtgtgtgttttgttttgtgtttttttttttttctaagacaaggtctctgttgcccaggagagactagagaagcactttttaagataggcctgttgggctcagatggtccttttatgggatacagtcttgctctgtgacccagactggagtgcagtggcgcgatcttggctcaatgcaacctccacctcccgggttcgagtgattctcctgcctcagcttcctgggtagctgggattacagatgcctgacatcacactcggctaatatttgtatttttcttttttattcattcattcatttttgagatggagtgttgctgtcacccagcctggagggcagtggcatgatcccggctgactccaacctctgcctctcaggttcaagccattctcctgcctcagtctcctgagtaggtggaattacaggcacccaccactacaaccagctactttttgattttgattttttttttttttttttttttttagtaaaggtggggtttcaccatgttggccaggctagtctcaaacccctgacctcaagtgagccgctggcctcggcctcccaaagtgctgagaatacaggcgtgagccaccgggcacagccatcagcaccttttactttatggaaatttttctggcactggtatagaacctcacgtggggtcaggtggagttgaggggacctcagtgtccctgcagatgggatgagcaagagcacggaggtggagtgcatggggcttcagtgtttattggggaaatgaagctgaaatctgggtgcatgaccaggagataaatgcatgagacggcggtctcactatgctgccctggctgaagtgggcttagatcctcctgcctctgcccctccccagtccttggtagatgggaccacatgtgaatattaaccccccatgcacagacaagaagaaagtaaggactgttctttggttcatacctgaccccagttaaacttgtattttagataaacaatgtatttgagatgtacttgaacaacaaacgatttgctgttcaggtgtgggcatctttgttttgtttttttttttcctaattttaaatatgggactagtgtgcatatggtggctcttgtctgtaattcctgcactttgtgaggctgagacaggaggatcacctgagatcagttgttcgagaccagcctggccaacatgaagccaggaggctgagctttcagtgagctgaaatcttctgctgcactccaccctgggcaacagagtgagactcagtctcaagaaagtaaaaaataggccgggcgcggtggcgcatgcctgtaatcccagcactttgggaggccgagacgggaggatcacctgaggtcaggagttcaagaccaacagggccaacatggcaaagcctcgtctctactaaaaatacaaaaattagctgggtgcaatggtgcacatctgtaattccagctactccggaggctgaggcaggagaatcccttgaacccaggaggaggagatttcagtgagctgaaatcaagccatggcattccagcctgggccagagagcaacattccgtctcaaaaataaatgaataaataaaataaataaaaataaatagataaatatgggacatcataaatttgggtgtcacctttgtgtagcagccagcgtaatctctgtcattccaatttttttttatgtgaactgccaaagcaagcacttgtgtaggaatttttcttcctgtgagcatacaatatatggaactttctttgacacagggtctcagaaatatatggtatatatttcgttatatatatacttatatataatataatcatatacacacaaaatactgttctaaatacagagaatactctgatataaccttgggtatttttttctttctttgtgtgtgtatgttttttatttgtttggctggtttttttttgtttttgttttttgttttttgttttttgtttttgtttttgttttgagacagagtctcactctgtcgccgaggctggagtgcagtgacaggatctcgggtcactgcaagctccgcctaccgggttcacgccattctcctgcctcagcctcctgagtagctgggaccacaggcacccaccaccacacctggctaatttttttttgtatttttagtagagacagggtttcgccatgttagccaggatgatctcgatctcctgacctcgtgatccacccgcctcggcctcccaaagtgctgggattacaggcgtcagccaccgcgcccggccagttggttatttttgagacaaggtctggctctatcacccaggctggagtgtagtggtgcgatcttggctcactgcaacctccacctcccacctaaacctgctgaattagtgtctacaggcatgcaccaccacacctggctcacttttgtgtttttcatacacatgggtttacaccatgttgctggggctggtctcaggaactcctgagctcaggtgatcctcccgtcttggccccctaatgtgctaggattagaggtgtgagccaacccaccccacccatacttacgtatttctgttcagattttattgagtttttatgaccaagcctatggtctatcctggagaatatttgtgtatgtgacaatgtatattcttcaacatcgtagactcgattttgggtgctcccatcgggactgtgtgtacctgtcctggaactcaagtgcacccttggctcataatccattgctcttctccagaaatcttaccaattctcctgcttaaatataagctacgtgtagtaggcattgttttttcttagcagatacgaaactcaggaagattgtcctatgataaacaaggctaacctgctgattgtttgaagcaaggaactggagatggtccttttaggggtttatgttttggattccagaaaacgtgtaaacagggccaatacgtgcatctttattttgtgtccagtttagcctggtcaacaaaaatgtcaacaaaaaacccagagtgctggagtaagaaggtctcgggctgtgactctccaaagggaagaattttctcttgtctaaaagaaaagaacgcacttccctttagagtgttaccgtgtgagaaaagcaatgctgaagttgatgctgatcttgcaaataactttgcagagcctgcttataatcagactttgacaatggtgggcgtctgtttttttttttctaagacaggatctctgttgcccaggctggagtatggtggcacttccaacctaggtctcttgggctcaaatggtcctcttttttgggacagagtcttgctctgtgacccaagctagaccacagtggcacgatcttggctcacggcaatctctgcctcccagtttcaagtgattcccctgcctcaacttcctgagtagctgggattataggtgtctgacaccatgactggctataattttcatttttcttatttatttatttttgagtctcgctgtctctcaggctggagtgcagtggcagcctttgcctcttgggttcaagcaattttcctgcctcagcctcccaagtagttggaattatatgtgtcaccatcatgccctttttgtttttttttagtagaaaatgggtttcaccacgttggccaggctagtctcaagcccctgacctcaagtgatcctcccgcctcagactcccaaagtgctgaaaatgcaggcgtgagccactgcaccgagccatcaacaccttctactccatggaaatgatactggcgctggtttatagaacctcacttggggtcgggcagatttaaaagggacctcaggctgggtgtggtggctgacgcctgtaatcccagcactttgggaggccgaggcgggtggatcacgaggtcaggagatcgagaccatcctggctaacatggtgaaaccctgtctctactaaaaatacaaaaaattagccaggcgtggtggcgggtgcctgtagtcccagctactcgggaggctgaggcaggagaatggtgtgaacccgggaggcggagcttgcagtgagccgagatggcaccactgcactccagcctgggcgacagagcaagactctgtctcaaaaaaataaataaataaataagggggtgggggacctcattgtcccttgcagatgggatgtgccctgcttagcaagagcacggaggtggagtgcatggctttgagttttcactggggcacggaggtggagtgcatggctttgagttttcactgggtaaatgcagctgaactcttggctgcacgaccaggtcatatgtgcaacgagacaggggtctcactatgctgcccaggctaaaatgggcttaggtccttttgcctccacctctccccagtccttagtagctgggactacatgtgaatattaaccatgcacaggcaagaggaaagaaaggaccgttctttggttcacacctagccgccagtcaaattagtattttagatgaagactgcatttgagacatacttgaacaacaaatgatttgctgtttaggtgtgggcatctttcttttttcctagttttaataatggcaccaggcagagtacagtggcccacgcctgtaattccagcactttgggaggctgagacaggaggatcacctgaggtcgggaatttgattccagcctggccaacatggtgcagccccatctctactaaaaatacaaaattagcccagcatggtggtggtatatgcttgtaatcccagctactctggaggctgaggcaggagagtcgcttgaagctggaaggctgatctttcaatgagctgagatcacgccactgcactcaagcctcggcaaaaagagtgagactccatctcaaaaacataaaaaataggccagacacggtggtccactcctgtaatcccagcactttgagaggccaggacaggcggatctcctcaggtcaggagtccaagactagctgggcaaacaaggcaaaacctcgtctatactaaaattaggaaaaatggctgggaacagtggtggacacctgtaatctcagctacttgggaggccacggcaagagaatctcttgaacctgggaaaaggagattgcagtgagacgaaatcacaccattgtactccatcctgggtgacagagtgagattctgtttcaaaaattaaataaataggccgagcacagtgactcatgcctgtaatcccagaactttgggaggccgaggtggcggatcacctgaggtcgggagttcaagaccagcctaaccaacacgtagaaaccccatctctactaaaaatacaaaattagccgggcatggtggcgcatgcctgtaatcccagctgctcgggaggttgaggcaagagaatcacttgaaccccagggggcggaggttgtggtgagccgagattgtgccattgtattccagcctgggcaacgagtgaaactctgtctctaaataaataaataaaactattaaataaacattaaacgttaaaaaataaaaatagataaatatgagatcatcatgaatttgagtgtcacctttgcgcagggcccatggtaatctttgtcattccaattttttcatgcgtgctgccaaagctagcacttgtgtgtaggaagtattcttcctgtgagcatacaatatatggaagtttcttttattattattattttttatgtttttgcgactgagttttgctcttgtcgcataggctgaagtgcaatggtgtgatctgggctccctgcgatgtccacctcttgggttaaagcgactctcctacctcagcctcctgagtagctgggattacaggcatacacttccagggctagctaatttgttgtattttagtagacgggatttctccatgttggtcaggctggtctcaaactcccgacttcaggtgatctgcccaccttggctttccaaagtactgggattgcagacagccaccgcggctggccttcatatattcttatatatataatatcatgtacacacaaaagactcttttacaccctgagaatactcttatatcactttgggcatttttttgttggtgtgtgcattttttgtttgttcgttcgtttgtttttgagacaagatctggccctgtcacctatgctggagtgcagtggtgtgatctcggctcccggcaacctcaacctcccacctcagcctcctgaattagtgtctacaggcatgcacctctatacctggctaacttttgtatttttacagatgaggttttaccatgtttcccaggctggtgtctaactcctgagaatataaggtatatgtagtaggcgttgctttttctctttgaagacaaaacccaggacagttgtccctcgatgaacaaggctaacctgctgaacgtttgaagcaaggaactggagatggtctttgtatcggtttatgttctagattccagaaaatatgcaaacaggaccaataaatgcatctttatttttgtgtccattttgaccaggtcaaggaaaatttcaacaagaaacccagagtgccggagcaagaagatctcaagctgtgagtctacaaagggaagccctttctgttgtctaaaagaaaagaaagtgcttctctttggtgggttacggtttgagaaaagcaacgttgaagttgatgctgatttcggtaatacatttgcagagcatgcttatcacacttggacgatggtggggttctgttttggttttgcttttttattctaaggctctgtgttgctcatgctggagtgcagtgacatgtccaatatatctcttggcttcaaatggtcagcctgggcaacacagggaaattctgtctcaaaaaataaacaaatgaataaaaatacaaaataaagccgggcatggtggctcatgcctgtaatcccagcactttgggaggccgatgcaggtagatcatctcaggtcaggagtttgagaccagtctgaccaacgtggtgaaaatccgtctctactaaaaatacaataacaacaaaaattagcccagtgtggtggtgggcacctgtaatcccagctacttaggaggctgaggcaggagaattgcttgaacccgggaggcagaggctgcagtgagccgagattgtgccacagcatccagccaggatgacagagtgagattccgtctgaaaaaaaaaaaaaaaaaaaaaagctgggcgctgtggctcacgcctgtaatcccaccactttgaaaggccgaggcgggtggatcacgaggtcaggagatcgagaccatcctggctaacacggtgaaaccccatctctatttaaaaatacaaaaaattagcgaggcgtggtggtgggtgcctgtagtcccagctacccgggaggctaaggcttgagaatggcttgaacccaggaggcggagcttgcagtgagccgagatcgtgccattgcactctagcctcggcaacagagcaagactccgtcaaaaagaaacaaaaacaaaaacaaaaaaaagaaccctacagtactggagcaagaagacctcatgctgtgaccctctagatggaagcactgtctgttgtctaagaaaagatcgtgcatccctttagagtgttactgtttgagaaaagcaacgttgaagatgctgctgatcttggtaatacatttgcagagcgtgcttatcatcagacttgcatgatgttggggttctctttggtttgtttttttccaagacaggttccctgttgcccaggcgggagtgggtggcacctccaaccgagatctcttgggctcaagtggtgatctttttatttttgattttttgagatgcgctctcattccgtttcccaggctggagtgcagcggcaggatccctgttgaccggaaactccgcctcccagcttccggcgattctcccacctcagcctgccgaatagttgggaatagagatgcccgccatcgtgtcctgctagttattatttttattgttgttgttgttgttgagatggagtttcactcttgatgtccaggctggagtgcagtgttgcaatttaggctcactgcaacctccacctcctgggttcaagcgattctcctgccgcagcctcctgggtagctgggattacaggtgcctactgccccacccagctaatttttgtgttttgaatagagactgggtttcaccatgttgggcaggctggtctcaaactcccgacctcaggtgatccaccagccttggcctcctaaagtgctgggattacaggcgtgagccaccgcccctaatctcacgtggtcctctagagtcagcctagactctggtctatcctggaggatgtttgtgtgtgagacaatgtatattcttcaacatcagcccaattctcttagctaaatgtaaggtatgagtagtaggtattcctttttctctttggggacaaaactcaggacgatcgccccttgatgaacaaggctaacctgctgagcctttgaagcaaggaattggagatggtcctttcaggggtttatgttctggattccataaaacatgtaaacagggccaataaatgcatttttatttttgtatccgttttaacctggtcaaggaaaattccaacaagaaacccagagtgctggagcaagaagatcccatgctgtgaccctctagaggaagcactttctgtttgttgtctgagaaaaaacaaagtgcttccctttagagtgttaccgtttgggaaaagcagtgttgaagttgatgctgatgttggtaatatatttgcatgcttattatcagacttggatgatgttggggttctgttttgtttttgttttctaagacagggtctctgtggcccaggctggagtacagaggcacttccaacctaggtctcttgggctcatatggtcctttttgggacagtcttcctctgtgacccaggctggagtgcagtggcacgatcttggctcactgcaatctccacctcgcgggttcaagctattctcctgcctcagcttcctgaatagctgggattgcaggggcccgacatcacacttggctaatatttgtatttttcttttttattcatttatttatttttgagatggagtctcgtttccccagctggagagcggtggcatgatcccgactgactccaacctctgcctctcaggttcaagcaattctcctgcctcagcctctgaagtagctgaaactacaggtggccgccaccacgcctggctacgttttgaatttttttttttttttttttcagtagagatggggcttaccatgttggccaggctggtctcaaacccctgacctcaagtgagccactcaccttggcctccgaaaatgctgagaatacaggcatgagccaccaccgcgcgcctcccaaaggcgtgagccatggtgcgtggccatcaacacctcttactttatggaaatttttctggcactggtatagaacctcacatggggtcaggtggagttgaggggacctcagtgtccctgcagatgggatgagcaagagcacggaggtggagtgcatggggcttcagtgtgtattggggaaatgaagctgaaatcttgggtgcatgaccaggagataaatgcatgagacgggggtctcactatgctgccctggctaaagtggtcttagatcctcctgcctctgcccctcccaggccttgttagatgggactacatgtaaatattaacccatgcacaggcaggaagaaagtaaggaccattttttggttcgtcccggccctcagttaaacttgtgttttagataaacaatgtatttgagatgtgcttaaacaataaatgatacgctatttaggtgtgggcatctttgtttccccctaattttaatgatgggactagtccaggtatggtggctcctgcctataattccagcactttgggaggccgagacaggaggatcacctgaggtcagttgttcgagaccggcctggccaacatggtgaaaccccgtccatactaaaaatacaaaaatcagccaggcctggttgcacacacctgtaatcccagctactcgggaggctgaggcaggagactcgcttgaagccaggaggctgagctttcagtgagctgagattgcgccactgcattccagcctgggcaactgagtgagtctcagtgtcaacaaagtaaataatagtctaggcacagcggcacacgcctgtaatcccagcactttaggaggctaagacgggaggatcacctgaggtcaggagttcaagaccaacggggccaacgtggcaaagccttgtctctactaaaactacaaaaattagctgggtgcggtggtgcacatctgtgattccagctactcgggaggccaagacaggagaaccacttgaacccaggaggaggcgatttcagtgagctgtaatgaagccatggcattccagcctgggccacagagcaagattccgtctcaaaaataaataaaacaaataaaaatacgtagataaatacgggaccgtcgtgaatttgagtgtcacctttgtggagcagccacggtaatctctgtcattccaattttttttatgtgcactaccaaagcaagaacttgtgtaggaattattcttcctgtgagtatgcgatgtatggaactttccttgagacagggtctcaaaaatatatcatgtatattttatatattcttatcatatataatataatcatgtacacacaaaatactcttctaaatacagagaatactctgatatcaccttgcgtattttttgtttgcatgtgtctgtgtttggttgttttttttttgtcatatttttgtatccctacttatatatttatttttaattttattattatactttaagttctagggtacatgtgcacaacgtgcaggttagttacatatgtatacatgtgccatgctggtgtgctgcacccattaactcatcatttagcattaggtatatctcctaatgctatccctccccgctacccccacccaacaacagtccccggtgtgtgatgttccccttcctgtgtccatgtgttctcattgttcagttcccacctatgagtgagaacatgcggtgtttggttttttgtccttgcgatagtttgctgagaatgatggtttccagtttcatccatgtccctacaaaggggttggttatttttgagacaaggtctgactctatcgcccaggctggagtgtagtggtgccatctcggctcactgcaacctccacctcccacctaatcctgctgaattagtgtctgcaggcatgcacaaccacatctggctcacttttgtattttttatacacatgggtttacaccatgttgcaggcgctggtctcaaactccctcccaagctcaggtgatcctctgtctcagcctcctaaagtgctgggattagaggtgtgagccaccacaccccactggtatttgtgtgttcctgttcaaattttattgaggagtttttataaccaagcctgtggtccatcctggaggatgtttgtgtgcatgacaatgtatattcttcaacatcgtagactcgatgttggatgctcccatcgggactgtgtgtccctgtactggaactcgagtgaacacttggctctaagttcattgctgttttctagaaatccagcccaattctcttggttaaatataaggtgcacgtagtaggcattgctttttctttctggagacaaaactcaggaggattgccccttgatgaacaaagctaacctgctgagactttgaagcaaggaactggagatggtccttttaagggtttatattctggattccagaaaatgtgcaaacagggccaataaatgcatctttatttttgtgtccattttaacctagtcaaagaaaattacaacaaaaaatccacagtgctggagcaagaagatctcatgatgtgaccatctggaggtaagaagcactttgtgttttgtgaaagaaagtgcttcctttcagagggttactctttgagaaaagcagcattgaagttgatgctgatcttggtaatacatttgaagagcatgcttatcatcagacttggatgatcttggggttttgtttttttctaagacagggtgtctgtagcccaggctcgagtgcggtggcacttccaacctagatctcttgggctcaacaagtagccctctttttcggacagagtctcgcgctgtgaccctagctggagtgcagtggcaggaacttggctcactgccacctctgcctcctgggttcaagcaattctcctgcctcagcctcccgagcagggttataggcatgtgccaccacacctggctaatttttgcattttattatcgattgattgattgattgttgagacagagtctcactctgttgcccaggctgtagtgcagtggtgtgatctcggctcactgcaacctccacctcccacctcagccttctgaatacctgtctacaggcatgcaccaccacacctcgccaacttttgtgttttttgtacagatgaggtttcaccatgttgcccaggctggtcttgaacccctgagctcaagtgatcctcccacctcggcctcctaaagtgtgagtcactatgtcccgccctacttgtgtgtttctgcttacattttattgaggcgattttttttttttttttgagacggagtcttggtctgttacctaggctggagcgcagtggcgcgatcttggctcactgcaagctccgcctcccaggttcatgccattctcctgcctcagcctcctgagtagctgggactacaggcgcccaccaccacgcccggctaatttttttgtatttttagtagagatggagtttcaccttgttagccaggatggtctagatctcctgaccttgtgatcctcccgcctcggcctcccaaagtgctgggattacaggcatgagcgaccgtattgaggcgcttttacaacatagcctgtggtctatcctggggaatgtttgtgtgtgtgacaatgtatattcttagacatcttagattccattttggatgctcccatcggtactatgtgttcctatataggaactcaagtgaacacttggcttaaaatccattgctcttgtctagaaatttagcccagttatcttggttaaagataaggtgtgtctggtaggcattgatttttctttccggagaaaaaacttaggaggatttcctcttgatgaacaaggctagcctgctgagcctttgaggcatgggacctggagatgatcctgtgaggggtttatgtttttggattcaggaaacacaccagcaggacaaataattgcatctttatttttgtgtctattttcaccaggctaaggaagattccaacaacatatccatggtgctgaagtaagaagatctcgtgctgtgaccctctagagggaagcactttctgttgaaagaaaagaacatgcatcctttcagagggttactctttgagaagagcaacgtttagtttgatgttgatcttggtagtacatttgcagagcatgcttttatcatcagacttggctgatggtggtgttctgttttttgttgttgttttctacaacaggatgtctgttgcccaggctagggtgtggtggcacttacaacctagatctctagggctcaaatggtcctcttatttggggcagagtcttgctctgtgatccaggctggagtgcagtggcaggaactctgctcactgcaacctccgcctcccgggttcaagtgattttcctgccttggttttctgagtaggtgggattacaggcgcacaccaccacacccagctagtatttgtagttttctttattattcttttttttattttaatttttgagacgaagtctcgctgttgcctacggtggagtgcagtggcgtgatctcggctctctacaacgtctgcctcccaggttcaagcaattctgctgcctcagcctcccgagtagctggaatcaacaggaacacaccaccatgcctggctactttttggatttttttttagtagagacggagtttcaccatgttggccaggctggtctcaaactcctgacctcatgtgagccacccacctcggccttccaaagtgctggaattacaggcatgaaccacgacgtctggcctaatttttgtatttttagaagagacagggtttcaccatgttggccaggctggtctcagctcctgacctcaagtgatcctccccctcggcctcccaaagtgctgggattacaggcgtgagccacctcgcccagcctcaagtggtcctcttgactcagcctcccatgtagttgggactacatggggcgtgccaccacacttggctaagtttttaatttttcatacagatatgatctctgttgctcaggaaggtctcaacacctgagctcaaggattccacaggcgtgagccacattctcctgctgacccttttcaaagatagttgacatggccaggcatcatggggcacacagtcccagccaccgcagatcccggggtgggagggtcctttgatttccagactattccatgcactgatcacaccttgtttttttgtttgtttgtttgtttgtttgtttgtttgacagagtctcagtttgttgcctggcgggagtgcaatgatgtgatctcgggtgactgcaacctctgcctccaaggttcaagtgattctcctgcctcaccctccaaagtagctgcggttacaggcatgcaccaccacacccagctcagtttttgcatttggtagagacaggttttcaccatgttggtcaggctggtctcgaactcctgatttcaggtgatccacctgcctcagcctcccaaagagctgggattataggcgttagcctatgcgcccggtctgtatttcctaattttaaatatgggacccatggtgaatttgggtgtcactgtgtacaggggacatgggaatctctgtcattccaatttttttaatgcatgctgttctgtgtaggaattattcttcctgtgagcaaacaacatagagagctttctttttttgacaccgggtctcaaaaatatatcatatacattttattataatgtctgatattgataatataatcatacacacacaaaatactcttctgtacacagagaatactgatatcactttggggtttttttgtttgcgtgcgttttttgggattttggggtgtttttttttttttttttgagacaacatctggctctgttgcccatgctggagtgcagtggtgcaattggctccctgcaacctccacctcccacctcccacttcagcctcctaaagagctgaatacaggcatgcaccaccacacctgactaacttttgtattttttgtacacacagggtttaccatgtttcccaggctggactggaactccagagctcaagtgatcctcccgacttggcctccttaagtactgcagttagaggtatgagccgccgagacccaccgtacttgtgtttttctattcaaatattattgaggagcttttatggcctaacctgtggtctatcctggaggttgtttgtgcgtacaatacatagtcttcaatatcttttttttttttttcattttttgagagggagtttcgctcctgtcacctaggctggagtgcaatgacatgatctcagttcactgcaacctccgcctcctgggttcaagtgattctcctgcctcagcctcctgagtagctgggattacaggcacccgccaccatgcctagctaagtttgtattttcagtagagacgggcttctccatgttggtcaggctgggctcagactcctgacctcaggtgatccgcccgcctcggcctcccaaagtgccgggattacaggcgtgagccaccgcgcccagtcatcatatattcttatcatatatatagtaggatgtttgtgtatataacaatgtacattttcaacattgtagattccattttggatgctcccattgggactgtgtgtccctgtgctggaactcaagtgaacacttggctcaaaatccattgctgttctctagaaatccagcccaattctcttggttaaatataaggtatgtgtagtaggcattgctctttctctttagagacaaagctcaggattgccccttgatgaacaaggctaacctgctgattctttgaagcaaggaactggagatggtccttttagtggtttatgttctggattccagaaaacatgcaaacagggccaatacatgcatctttacttttgtgtccattttaacccggtgaaggaaaattccaacaaaaaacccacaatgctggagcaagatctcaggctgtgaccctctagagggaagcgctttctgttggctaaaagaaaagaaagcgcttcccttcagagtgttaacgctttgagaaaagcaacgttgatcttggtaatacacttgcagagaatgcttataatcaaccatggaaggtggtggggttttgtgtttgtttgttttgttttgttttctaagacagggtgtctgttgcccaggctggagtgtggcggcccctccaacctagatctcttgggttcaagtggccctcttttttgggacagagtcttgctctgtgaccctgccctggctggagtgtcctgtcaggatctccactcactgcaacctctgcctcctggggtcaagggattctcctgcctcagcctcccgagcagctgggattacaggtatgtgccaccacacctggcttatttatttatttatttatgagacagagtcttgctgtgtcatccatgctggagagcagtggtgcaatctcggctctctgcaacctccacctcccacctcagtctcctgaattagtatctacaggcatgtaccaccatacctggctaacttttgtatttttacagatgaggttttaccatgtttcccgggctggtgtctaactcctgagctcaagtgatcctcctgccttggcctacgtaagtgctgcggttagaggtgtgagccaccgcgccccacctgcccttgtgtatctctgttcaaatgttactgagaagcatttacgggataatgcccggaggatgtttgtgtgtgtgacagtgtacattcttcaacatcttagattccattttggatgctcccctcgggactgtgtgtctctgtcctggaattcaagtgaacacctggctctccatccattgctgttctctagaaatccagcccaattctcttggttaaatataaggtaggtgtagtaggcattgctttttctctttggggacaaaactcaggaggattgccccttgatgaacaaggctaacctgctgattctttgaagcaaagaactggagatggtccttttaggggtttttattcaggattccagaaaacatgcaaacagggccaaaaattgcatctttatttttgtgtccattttgacctggtcaaggaaaatttcaacaagaaacccagagtgccggagcaagaagatctcaagctgtgactgcaaagggaagccctttctgttgtctgaaagaagagaaagcgcttccctttgctggattacggtttgagaaaaacaacactgaagctgatgccgatcgtggtaatacatttgcagagcatgcttatcatcaggcttggacaatgccggggttctgttttcggttttgcttttttattctaagacaggatctctgttgcccaggctggagtgcagtgacatgtccaacccaggtctcttgaattcaaatggtcctttttagggggcagagtctttctctgtcacccaggctgatatgcagtgaggcgatctcggctcactgcaacctctgcctcccaggttcaagcaattctcctgcctcggcttcccaagcagctgagattacaggcgttcatcaccatacctggatgatatttgtattttttaaaatttatttatttatttatttttgagacggagtctcgctgtcacccagtctggagggcagtggcacaatctcggctcactgcaacctctgcctccccggttcaagcaattcttctgcctcagcctcctgagtagctggaattacagaagcacaccaccgcacctagttactttttgtatattttttttaagtagagactggatttcaccgtgttggctaggctggtctcaaattcctgacctcaagtgatccacccacctctgactcccaaatttctgggatcacaggtatgcgcccccatgcctggcctaatttttgtatttttagcagagacgtggtttcaccatgttggccaggctgaactcagctcctgaccttaggtgatctgcccgcctgggcctcccaaagtgctgagaatacaggcgtgagccaccgtgcctggccattaacaccttttggtccacggaaattattctggcactggtttatagaacctcgcttggggtcaggtagagttgaaggggaccccaatgtccttgcaggtgggatgtgcactgcttagcaagaacacggaggtggaatgcatggggtttgagtttttattggagaaataaagccaaaatcttgggtgcatgaccaggtcgtatatgcaacaatacgggcgtctcactatgccgcccaggctaatgtgggcttagatcctcctgcctctgcccctccccagtccttagtagctgggactacatgtgaatattaactcacgtacaggaagaggaaagtaaggactgttctttgattcacgtcccacccccagttaaatttgtattttagataaacaatgtatttgagatgtacttgaacaacaaatgatttgctgtttagatgtgagcatctttttttgctcctgattttaaacataggacaaggtcaggtatggtggctcacgcctgtaattccatcattttggtaggcagagacaggaggatcacctgaggtcagctgcttgagaccagcctggccaacatggtgaaaccccatctgtactaaaaatacaaaaattagccatgcgtggttgtgctgcacgcctgtaatcccagctactcaggaggatgaggcaggagaatcgcttgaagccgggaggcagaggttgcagtgagctgagatcgcgccagtgaactacagcctgggcaaaagaataagattcaatctcaaaaaaataaaaaataggccaggcacggtggcacacacctgtaatgctagcacttttggaggtcgagacgggggcatcacctcaggtcaggagttgaagaccagctgcggcatcacggcaaagcctcatctctacgaaaaatacaaaaattagccaggtgcagtggcaggtgcctgtaataccagctactcgggagaccaaggcaggagaatcgttccaactgggcggcagaggttgcagtgagccaagatcgtgccactgcactgcagcctgtcgacagagtaagacttggtctaaaaaaaaaaaataaataaataaataaaagataaatatggaaccatcatgaatttgggtgtcacctctgtgtgggggccagggtaatctctgtcaatccaatttttttttatgtgcaccagcaaagcaagcacttatgtttaggtattattcttcctgtgagcatacaatatgtagatctttattttctttgagacatggtctcaaaaatgtatgatgtggctgggcacagtggctcaagcctgtaatcccagcactttgggaggctgaggcgtgtggatcacccgaggtcaggagttcaagaccagcctggccaacatggtgaaaatccgtctctacgataaatacatatatatatatatgtatatatgccgggcatggtggcaggtacgggtaatcccagctacttgggagcctgaggcaggagaatcgcttgaacctgggaggtagaggttactcatatcactatgagattgttttttgttcttgtgtgtgtggtttttgtttgtttttgagacaaggtctggctctgtcacccaggcaaaagtgtagtagtgcgatctcggcttactgtaacctccatctcccacctatgcgtcctgaattagtgtgtctacaggcatgcaccaccacagtgggctaccttttttttttgagagggaattttgctcttgttgcacaggctggagtacaatggcaagatttcagatcactgcaacctccgccttccgggttcatgtgattctcctgcctcagcctcccaagtagctgcgattacaggcatgcaccatcacacttggctaattttgtattttgagtagatacaggtttccccatgcttgtcaggctggtctccaactcctgacctctagtgatccacctgcctcggactcccaaattgctgggattacaggcatgagctaccacacccagccacctggctaacttttgtagtttttctacagactacaaaatggtttcaccattttacctgagactacaaaatggtttcaccattttacctgagactacaaaatggtttcaccattttacctgagctggtctccaacacctgagctaaagtgatcctcctgcctcggcctcataaaatgttgggattagaggtgtgagccaccgtgcctcacccgtacttgtgtatttctttatttttattgatttatttattttgagacagagtttcactcttgttgcccaagctggagtgcaatggcacaatctcggctcaatgcaacctccttctcttaggttcaagcgattctcctgcctcagcttcccgggtagctgggattaaaggcgtccaccaccacacccagctaatttttgtgtttttagtagagacagggtttcagcatgttggccagactggtctcaaactcctaacctcaggtaatccacctgcctcagccttccaaactgctgggattacaggcatgagccactgcgcctagcctcaagtggtcctcttaagtcagcctaaactgtggtctatcctggaggatgcttgtgtgtgtgacaatttatattcttcaacgtcttagattctattttggaggctcccaaggggattgtgtgtccctgtgctggaactcaagtgaacacttggctgtacatccattgctgttctctagaaattcagcccaattctcttggttaaagataaggtatgtgtagtaggcattgctttttctttccagagacaaaactcaggaggattgccccttgatgagcaaggctaacctgctgattctttgaagcaaagaaccagagatggtccttttaggggtttatgttctggattccagaaaacaggcaaacaggaccaataaatatatttttatttttctatccactttaacctggtcaaggaaaattccaacaagaaacccagagtgctggagtgagaagatcccatgctgtgaccctctagagggaagcactttctgttgtctgaaagaaaccaaagcgcttccctttggagcgttacggtttgagaaactcaatgttgaagttgatgctgacttcagtaatacatttgtagaggatgcttatcatcagacttggatgatatcggggttctgtgcttttttttttttttttctcctaagacaaaatctgtattttccaggctggagtccataagcacttccaacctaggtctcttgcgctcagatagtcctcttttttgggacagagtcttgctctgtgacccaggctggagtgcagtggcgtgatctcggctcactgcaacctctgtctcctgggctcaagcaattctccttcctgagcttcctgaggagctgggattacaggcgcctgacatcatccttggctaacatttgtatttttcttttttattcatgtatttatttacttttcagatggagtctcgctgtcgaccaggctagagggcagtggcacgatcccggctgactacaacctgtacctctcaggttcaagcaattctcctgcctcagcctctggagtagctggaattacaggaacacaccaccaggcccggctactttttgtattattattattattattattttttttttttttcactaaagagggggtttcaccatgttgtccagagaatacaagcatgagccactgcgcagccatcaacaccttttactgcatggaaattattctggcactggtatagaacctcacatggggtcaggtggagttgaggggacctcagtgtccctgcagatgggatgagcaagagcacggaggtggagtgcatggggcttcagtgtttattggggaaatgaagctgaaatcttgggtgcatgaccaggaaataaatgcatgagacaggggtctcactgtgccgccctggctaaagtggtcttagatcctcctgcctctgcccctccccagtcctaggtagatgggactacatgtgaatattaacccatgcacagacaagaagaaagtaaggactgttattttgttcgtacccagcccccagttaaatttatcatatatataatatatcatatatataacataatcatatacacacaaaatgctgatttgaatacagagaatactctgatatcactttgggtattttttggtttgtttctgtgtgtgtgtgttttatttgtttggttggttatttttgagacaaggtctggctctatcacccaggctggagtgtagtggtgcgttctcagctcactgcaacctccgccttccacctaagcctgctgcattagtgtctacaggcatgcaccaccacacccggctcacttttgtattttttgtacacatggggttacaccatgttgccggggctggtctcgaactcctgacctcaggtgattctcccgtcttggcctcctaaagtgctagaattagaggtgtgagccaccgtgccccacctgtacttgtgtatttatgttaaaattgtgttaaggagtttttatgaccaagcctgtgatctattctggagaatatttgtgcgtatgacaatgtatattcttcaacatcgtagattccattttggatgctcccactgggactgtgtgcctatactggaactcaagtgaacacttggctcaaaatccattgctgttctctagaaatccagcccaattctcttggttaaatataaggtatgtgtagtaggcattgctttttctttctagagacaaaactcaggaggattgccccttgatgaacaaggtaacctgctgattctttgaaacaagaaactggagatggttcctttaggggtttatgttctggattccaggaaacatgcaaacagggcccacaaatgcatctttatgtttgtgtccattttaacctggtcgaagaacattccaacaaaaaatccaccatgcaccgagcaagaatatctcaggctgtgaccatctggaggtaagaagcactttctgttttgtgaaagaaaagaaagtgcttcctttcagagggttactctttgagaaaagcaacgttgaagttgatgctgatcttggtaatacatttggagagcatgcttatcatcagacgtggatgacggttgggttttgtttttgttttattttttatcttaggcagggtctctgttgcccaggctggagtgtgttggcacttccaacctagatctcttggtcttaaatggtcctctttttggggggcggagtctcactctgacccaggctggagtgcaatggcaggaactcccctcactgcaacctccacctcccgggttcaagcgattctcctgcctcagttttccgagtcgctaggattacaggctcactcctccacacctggctaatatttgtagttttctttattattcatttatttatgtgtttttgagaaggagtctcgctgtcgcccaggctggagtgcagctgcacaatctcagctcactgcaacttctgccactggagtaactgggatttcaggtgcgtgccaccacacttggccaattttttatgtgtgtatttttagacccggggttttcccatgttggccaggctggtctggaactcctgacctcaggtgacccatgcacctcggcctcccagagtgctgggattacaggcatcagccaccgcacccggccctgtctctgacttttgcgaactgaggaagtaaccttttgaaatttactctgaagtgtgaatgattttagcatattttcaaccaccaacattctagttcaggagattttcatcaccccaaagaggcttattcccatttgcagtcagttcccaccccactcttccacccagaccgtgacaaacactttgcatctctctagctctggatctgcctcttgtgggcatgtcacatagatcagttttgaataggtggcctgttgtgaccactgtaattgaggataatgggttggtcctggttgtctgcagtgtgaatcttaccactgaagggtggtccctggatggaagcaggaggctgggagaactgggcggaacatcctttgggaatggagtcgggcgggcagaccctgatgcctgggaagctcacaagggtggaagaccacatcttcctccctgagaactgcaaggtgaccctcctggggtactggaaggagtgaaggcctctggactgggaacaccagggcattgcaccggtgcaggcaggatgagccaaggggaacggagagccaggcatcgctaactggcgacaatttgggtttgatctggacggagtctgtgtcttctggtagagagaacccctgggattttcgctctgctcctggctgtctttcagtcatggaatctgatgacaaagactcccgcccagagccaagacatttggtttctggaccccagtggtcctttctgcctggacttgggatcttttggggaagtttgggatctggcagggcatctgcataatccatagaaatccctgagagtcccttccctttgctgacatctccatgttcctacctattagcttccaaaggagactcctatctgaattgccgaaggcagcttcccaggccagggatacccagttaaatttgtatttcagatcaatagtatatttcagatgtacttgaacaagaaatgatttgctgtttaggtgtgggcatttgtatttccccctttttttttttttttttttttttttgacagagttttgctcttcttacccaggctggaatgcaatggcacaatcttgactcactgcaacctccacctcccaggttcaagcgattctcctgcctcagcagcccgagtagctgggattacaggcatgcgccaccacacccggctcagtttttgcatttagtggagatgggggttcaccatgttagccaggctggtctcaaactcctgacctcaagtgatttccctgcatcggcctcccaaagtgctgggattataggcatgagcctccacgcctagcctcaagtggtcctcttgagtcaacctagactacagtctatgctagagaatgtttgtgtgtgtgacaatgtatgttcttgaacatcatagattccactttggatgctcctgtcgggactgtgtgtccctgtgctggaactcaagtgagagttggctgaaaatccattgctgttctctagaaatccagcccaagtctcttggttagagataaggtatgtctagtgggcattgctttttctttttggggacaaaactcagaaggattgccccttgatgaacaaggctaacctgctgattctttgaaggaaggaactggagatggtcttttaggggtttatattctggattccagaaaacttgcaaacagggccaatacatgcatctttatatttgtgtccgttttgaactggttaaggaaaatttcaacaagaaacccagagtgccggagcaagaagatctcaagctgtgggtctgcaaagggaagccctttctgttgtctaaaagaagagaaagcgcttccctttgctggattacggtttgagaaagcgacgttgaagttgatgcatttgcagagcatgcttatcatcaggcttggacaatggcggggttctgttttggttttgctttttcattctaagacaggatctctgttgcccaggctggagtgcggtggcagtggcatgtccaacctagccctcttggattcaaatggtccttttttgcaagcaaagtctctctctctcacccaggctggagtgcagtgatgtgatctcggctcgccgcaacccccgcctcctgggttcaagcgattctcctgcttcagcttcccaagtagctgagattacaggcacccatcaccacacctggataatatttgtatttttaaaaattcatttatttatttatgagacggagtctcgctgtcacccatgctggagggcagtgacacgatctcggctcactgcaatctctgcctcctgggttcaagcaattcttcctcagcctcctgactagctggaattacaggagcacaccaccgcacctggctactttttgtattttttttttagtagaaatgggatttcaccatgttggttagactggtctcaaactcctgacctcaagtcatccgcccacctctgactctttctgggattgcaggtatgcgcccccacgcctggcctaatttttgaatgtttagcagagatggggtttcaccatgttggccaggctgaactcagctcctgaccttaggtgatctgcctgcctcggcctcccaaagtgctgagaatacaggcgtgagccaccgcgcctggccatcaacaccttttaccccacagaaattattctggcactggtttatggaacttcacttggggtcaggtagaggtgaaggggaccccaatgtcccttgcagatgggatgtgtactgctcagcaagagcatggaggtggagtgcatggggtttgagttttcattggggaaatgaagctgaaatcttgggtgcatgaccaggtcgtatatgcaacgagacgggcgtctcactatgccgcccaagctaaagtgggcttagatcctcctgcctctggccctccccagtccttagtagctgggactacatgtgaatattaactcatgtacaggaagaggaaagtaaggactgttctttgattcatgccccacccccacttaaatttctatttcagataaacaatgtatttgagatgtacttgaacaacaaatgatttgctgtttaggtgtgggcatctttttttgttcctaattttaagtataggacaaggctgggtaccacggctcacacctgtgattccatcattttgggaggccaagacaggaggatcacctgaggtcagttgtttgagaccagcctggccaacatggtgaatccccatctctactaaaaatacaaaacttagcccagtgtggtggtggtacacgcctgtaatcccagctactcaggaggctgaggcaggagaatcacaggaagccgggaagctgagctctcagtgagctgagatcgcaccactgaactccagcctaggcaacagtgagactcaatctcaaaaaaataaaaaataggccgggtgcggtggcacacgcttgtaatcccagcactttgggaggtcgagacgggtggatcacctcaggtcagagttcaagagcagccccgccatcaagacaaaacctcctctctactaaaaatgcaaaatatagctaggcgtggtggtacacacctgtagtctcagctacgtgggaggcggcagcaggagaatctcttgaacccgtgagaaggagattgcagtgagctaaaatcacaccattgcactgcagcctgggcgactccatctcaaaaaataaatacataaataaataaatacataaatacataaaaaataacccagagtactggagcaagaagatctcaggcagtgaccctctagatggaagcactgtctgttgtctaagaaaagatcgtgcatccttttagagtgttactgtttgagaaaatcaacgttgaagatgctgctgatcttggtaacacatttgcagagcgtgcttatcatcagacgtgcatgatgttggggttctgtttgttttgttttttttttccaagacagtgtctctgttgcccagactagagtgggtggcacctccaaccgagatctcttgggctcaagtggtcctctttttattttttgattttttgagacccactctggtttcactgggagtgcagtagcagaatctctgttgaccggaaactccacctctcaggttccagtgtttctaccacctcagcctgccgaatcattgggaattcagttgcctgccatcaggtcttgctaattattattgtttttttgttttttttttttgaggcggagtttcgctcttgttgcccaggctggagggcaatagcgcgatctcggctcaccgcaacctcggcctcccgggttcaagtgattctcctgcctcagcctcccagatagctggaattacaggtgcctaccaccccacccagctaatttttgtgttttcagtagagatggggtttcaccatgttgggcaggctggtctcaaactcctgacctcaggtgatccaccagccttggcctcccaaagtactgggattacagctgtgagccatcacccctaatctcaaatggtcctgtagagtcagcctagactgtggtctatcttggaggatgtttgtgtgtgagacaatgtatattcttcaacattgtagattccattttggatgcttccatcgggactgtgtgcccctgtcctggaactcagctgaacacttggctcaaaatccattgctgttctctggaaattctgccctaatctcttggttaaatataaggtatgtgtagtaggctttgctttttctctttggggacaaaactcaggagggttgccccttggtgaacaaggctaacctgctgagcctttgaagcaaggaactggagatggtccttttaggggtttatgttctggattccagaaaatatgcaaacagggccaataaatgcatctttattttgtgtgtattttaacctggtcaaggaaaattccaacaagaaacccagagtgctggagcaagaagatcccatgctgtgaccctctagaggaagcactttctgtttgttgtctgagaaaaaacaaagtgcttccctttagagttactgtttgggaaaagcagtgttgaagttgatgctgatgttggtaatatatttgcatgcttatcatcagacttggatgatgttggggttctgggttttttttgttttctaagacagggtctctgtggcccaggctggagtacagaggcacttccaacctaggtctcttgggctcaaatggtcctttttgggacagagtcttgctctgtgactcaggctggagtgcagtggtgcaatctcagctcactgcaccctccacctcctgggttcaagtgattctcctgcctcagcttcctgggattacaggcacctgacatcatgcccagctaatatttgtatttttcttttttattcattcatttatttattttttaggtggagtcttgctgttgccaagtctggagggccatggcacgatcccggctgactccaacctctgtctctcaggttcaagcaattctcctgcctcagcctcctgagtagctggaattacaggcgcttaccaccacgcctgactgcttttcgaatgtgtgcgtatgtgtgtgtatgtgtgttagagagaaagagagagagagagatggagtttcactcttgttgcccaggctggagggcaatgacatgatctcggcccatacaacctcagcctcctgggttcaagtgattctcctgcctcagcctcctgagtagctaggattacaggcatgtgccaccacacctggctaattttgtatttttagtagatatggggcttccccatgttggtcaggctggtctcgaactcctgacctcaaatgattcacctgcctcagtctcccaaagtgctgggattacaggtgtgagccaacatgcccggcctgaattttttttttttttttttttttttcaagtaaagacggggtttcaccatgttgaccaggctggtctcaaacctctgaactcacgtgagctgctcgcctcggcctcccaaaggcatgagccatggtgcgtggccatcaacacctcttactttatcgaaatttttctggcactggtatagaacctcacgtggggtcaggtggagttgaagggacctcagtgtccctgcagatgggatgagcaagagcacggaggtggagtgcatggggcttcagtgtttattggggaaatgaagctgaaatcttgggtgcgtgaccaggaaataaatgcatgagacgggggtctcactatgccaccctggctaaagtgggcttagatcctcctgcctctgccccccgcagtccttgctagatgggactacatgtgaatattaacccatgcacagacaagaagaatgtaagaaccattatttggttcacaccgggccctcagttaaacttgtattttagacaaacaatgtatctgagatgtccttgaacaacaaatgatttgctgttcaggtgtgggcatctttgttttttccctaattttaatgatgggactagtctgggtacggtggctcccgcctgtaattccagcactttgggaggctgagataggaggatcacctgaggtcagttgtttgagaccagcctcgccaacatgatgaaacctcgtctgaactaaaaatatagatattagccagacggggtggtggtgcacccctgcaatcccagctactcaggaggctgaggcaggagaatcacttgaagccaggaggctgagctttcagtgagctgagattgagccactgcactccagcctgggcaacagagtgagactcagtctcaaaaaagtaaaaaataggctgggtgtgggccgggcgcggtggctcacgcctgtaatcccagcactttgggaggccgaggtgggtggatcacaaggtcaggagactgagaccatcctggctaacacggtgaaaccctgtctctagtaaaaatacaaaaaaaaaaaaaaaattagccagacgtgatggtgtgcgcctgtactcctagctactcagaaggctgaggcaggagaatggcctgagcccgggaggcggagcttgcagttagctgagatcgcaccactgcactccagcctgggtgacagagcaagactccgtctcaaaaaaaaaaaaaaaaaaaaaaaggcggggtgtggtagtgcacatctgtaatcccagcatttcgggaggccaagacaggaattacctgaggtcaggagttcaagaccaacagggccaacatggcaaaacctcgtctctactaaaaatacaaaaattatctgggtgcagtggtacacatctgtaattccggctacccagaggctgaggcaggagaatagcttgaacccaggaggaggagatttcagtgagctgaaatcacaccattgcacttcagcctgggccacagagcaagattgtgtctcaaaaataaataaataataaaaatgacataaaatcaataaataaaaataaatacataaatacaggaacatcattaatttggatgtcacctttgtgcaggggccagggtaatctctgtcattccaattttttttatgtgcactgccaaagcaagcactcatgtaggaattatccttcctgtgagcatataatatatggaacattctttgagacagggtctcaaaaatatgatgtgtatttcatcatatatataatataatcgtatacacacaaaatactgtttaaatacagagaataccctgatatcaccttgggtatttttctttgtttctgtgtgtgtgtgtgtgtgtgtgtgtgtgtgtgtgtgtgtgtttgtttggttatttctgagacaaggtctggctctatcgcccaggctggagtgtagtggtgtgatctcaactcactgcaacctccgccccccacctaaacctgctgaattagtgtctacaggcatgcaccagcacacctggctaacttttgtattttttgtacatatggggttacaccatgttgccggggctggcctctaactcctgagctcaggtgatcctcccgcctcagcccctaaagtgctgggattagaggtgtgagccaccgcaccccagccatacttgtgtatttctattcaaattttattgaggagtttttaccgcccagcctgtggtctatcctggagaatgtttgtgtgtgcgacaatgtatattcttcaccatcgtagattccgttttggatgctcccatcgggactgtgtgtccctgtgctggaactcgagtgaacacttggctcaaaatccactgctgttctctagagatctgtagggtccagccctactgggcctgtgggtttttctcttcgtgagcagataggagagattgtagaaataaagacacaagacaaagagagagaagaaaaggcagctgggcctgggggaccactaccaccaagacgtggagaccggtagtggccccgaatgcgtggccgcgccgttatttattgtatacgaggcaaaagggcagggtaagaagtgtgagtcttctctaatgataggtaagatgacgcgagtcacgtgtccaccggacagggggccccttccctatttggtagcttaggcggagagagattggggacagcttacgtcattatttcttctatgtatttctcggagagatcaaagactttaatactttcacttattctgctaccgttatctagaaggcggagccaggtgtgcagagcggaacgtgaaagtggaccaggagcgtgaccgctgaagcacagcatcacagggagacgtttaggccaccagacggctgcgggcgggcttgactgatgtcaggctttccacaagaggtggtggagcagagtcttctctaactcccctggagaaagggagactccctctccgggtttgggaaggtaagggggtccttcccaggcactggcgctaccgctgtgctaagtgacgggtgccttccccctggtgttaccgctggaccagggagccctctagtggccgtgtccgggcatgacagagggctcacgctcttgtcttctggtcgcttctcaccgtgtcccttcagctcctatctctgtatggcctggttttccctaggttatgattgtagaacaaagattattataatattggaataaagagtaatgctacaaactaatgattaataatattcatatataatcatatctataatctatttctagtataactagtcttattctatatattttctttgttatactggaacggcttgtggtgagtttctttattataccggaacagcttgtgccttcggtctcttgcctcggcacctgggtggcttgccacccacagaaatcctgcccgtttctcttggttaaatataatgtatttctagtaggcattgcttcttctttccagagacaaaactcaggaggattgtgctatgataaacaaggctaacctgctgattctctgaagcaaggaactggagatggtccttctaagggtttatattctggattccaggaaacatgcaaacaggacccataaatgcatctttattttggtgcccattttgacctggtcaggagaattccaacaaaaaatccacggtgttggagcaagatctcaggctctcaggctgtggccatctagaggtaagaagcactttctgttgtcttaaagaaaagaaagtccttttttttttttttttttttttttgagacaatgtctcgctctgtcgcccaggctggaatgcagtggcgtgatcttggctcactgcaagctccgcctcccgggttcatgccattctcctgcctcagcctcctgtgtagctgggactacaggcgcccgccaccaagcccggctaattttttgtatttttagtagagacggggtttcatcttgttaggcaggatggtctcgatctcctgacctcatgatccacccgcctcggcctcccaaagtgctgggattacaggcgtgagccaccacgcccgcccagaaagtgctttctttcagagggttacggtttgagaaaagcagcattgaagttgacgctgatcttggtaatacatttgcagagcatgcttatggtcagacgtggatgatggtggggttttgtttttgttttgttttttatctgagacagggtgtctctgttgcccaggctggagtgcagtggcacatccaacctagatctcttgggctcaagtggtcctctttttgaaacagagtctcactctgttaccctggctggagttcagtggcaggaacttggctcactgcaatctctgtctcctgggttcaagcaattctctggcctcagcctcccgagcagggttacaggcatgtgccaccacgcccggctaatttttgcatttttttaattgatttatttgtttgttgttgagacagtctcactctgttgcccaggctgtagtgcagtggtgtgatctcagctcaccgcaacctccacctcccatgtcagcctcctgaatacctgtctccaggcatgcacccccacacctggctaacttttgcattttttgtacagatgaggtttcaccatgttgcccaggctggtcttgaacccctgagctcaagtggtcctcccacctcggcctcctaaactgctgtgattaatggtgtgagccaccgtgccacacccgtacttgtttgtttctgctcaaattgtattgaggagcttttacatcctagtctgtggtctatcctggaggatgtttgtgtatataacaatgtacattttcaacattttagattccattttggatgctcccatcgggactgtgtgtccctgtgctggaactcgagtgaacacttggctcaaaatccattgctgttctctagaaatcctgccctattctcttggtgaaatataaggtatgtctagtcggcattgatttttctttctggagacaaaactcaggagggttgcccctgcatgaacaaggctaacctgctgagcctttgaagcaaggaactggagatggtttttttaggggtttatattctggattccagaaaacatgcaaacagggacaatgaatgcatctttatttttctgtccattttaacctggtaaacgaaaatttcaccaaaaaacccagagtcctggagcaagaagatctcaggctgtgaccctccaaagggaagaactttctgttgtctaaaagaaaagaacgcacttccctttagagtgttaccgtgtgagaaaagcaacgttgaagctgatgctgatcttggtaataagtttgcagagcctgcttatcatcagacttggacgacggtgtagttctgttttggttttgagttttttgtttgtttgttttgttttgcttttgagatggaggcttgctctgtcgcccaggctggagtgcagtggcgtgttctcagctcactgcaacctccgcctcccaggttcacgccattcttctgcctcttgagtagctgggactacaggcgcccgccaccacgcctggctaattttttgtatttttagtagacacagagtttcactgtgttagccaggatggtcttgatctcctgaccttgtgatccacccgccttggcctccaaaagtgctgggattacaggcgtgaaccactgcgcccggccttaatttttgtatttttagtagagacaggaggctgagctttcagtgagctgagttcgttccactgcactccagcctgggcaacagagtgagactccatctcaaaaaaataaaaaataggccgagcgtggtggcacatgcctgtaatcccagccctttgggaggccgagacaggtggatcacctgaggtcaggagttaaaggctggctgggccaacaaggcaaaacctcgactctactaaaaatacaaaattacacctgtaatcttagctgcttggggggctgtggcagaagaacctcttgaacccaggaagaggagattgcagtgagacgaaatcataccattgcactctagcctgggcgacagagcgagattctgtctcaaaaaataaataagtagggcagacagggtggctcacgtctgtaatcccagcactttgggaggcaaggcgggtaaatcacaaggtcaggagttcgagaccagcctggccaacatggcgaaaccccatctctactaaaaatacaaaaaagtagctgggcatggtggctggcacctgtagtcccagctacttgggaggctgaggcaggagaatcgtgtgaacccaggaagcggaggttgcagtgagccgagatcgggccattgcactccagcctgggcgacagtgcgagactctgtatcaaaaataagtaaataaataaacaaaataaaagtaaaaagaattaaatagataaatatggtaccattatgaatttgagtgtcacctttgtgcaggggtcatggtaatctttgttatttcaatttttttatgcgtattgccaaagcaagcacatatgcgtaggaattatacttcctgtgagaatacaatatatggagctttcttttttgttttttctgtttgtttgttttttgagacacagtttcactcttgttgcccaggctggagtgcaatgtcacgatctcagctcacggcaacctctgcctcctgggttcaagcgattctcctgcctcagcctcccaagtagctgggattgcttgcatgtgccaccaagcctagctaattttttgtatttagagtagagatggggtttctccatgttggtcaggctggtctcgaactcctgacctcagatgatccatccacctcagcctcccaaagtgctgggattacagatgtgagccaccatgcccggccatgatatatttttatatatgtaatatcacatacacacaaaatactcttctatgcacagagaatagtcttatatcactttgggtatttgtgtgtgtgtgtgtgtgtgtgtgtgtgtgtgtgtgtgtgtgtgtgttttgtttggttggttatttttgagacaaggtctggctctgtcatccaggctggagtgtagtggtgtgatctcagctcactgcaacctccacccccgacctaagcctactgaattagtgtctacaggcacgcactaccacacctggctcacttttgtattttttgtacacatggggtttcacaatgttgccggggctggtctcaaactcctgtgctcaggtgatcctcccatcacggcctcctaaagtgctggaattagaggtgtgagccgccacgccccacctgtacttgtgtatctctgttcaaatgttactgaggagcttttacagcgtaacctgtggtctatcctggaaaatgtttgtgtgtgagacaatgtacattcttcaacatcttagattgcagtttggatgctcccgtcaggactgtgtgtccctgtgctgggactcaagtgaacactgggctctccatccattgctgttgtctagaaatccagcccaattctcttgggtaaatatgaggtatgtgtagtaggcattgctttttctttctggagacaaagctcaggaggattgccccttgataaacaaagctaacctgctgattctttgaagcaaggaactggagatggtccttttaggggtttatattctggattccagaaaacatgcaaacaggaccaataaatgcgtgcttatttttgtgtctgttttaacctggtcaaggaaaattccaacaaaaaatccacgatgctggagcaagaagatctcaggctgtgtccctctagagggaagcgctttctgttgtctgaaagaaaagaaaatggttccctttagagtgttacgctttgagaaaagcatcgctgatcttggtaacacatttgcagagaatgcttataatcagacgtggatgatgttgaagttttgcgtttgttttgttttgttttttttcctagacagggtgtctgctgcccaaactggagtgcggtggcacttccaacctagacctcttgggtttaagtggccctctattttgggatagagtcttgctctgtggccctggctggagtgcagtgtcaggaactctgctcactgcgacctctgcctcctaggttcaagcgattctcttgcctcagcctcctgagcagctgggattacgggcatgtgccaccatgcctggctaatttttgtattttttattatttatttatttatttatttttgagacagagtctcgctctgtcacccaggctgaagtgcagtggtgcgatcttggctcaccgcaacctctacctcccacctcagcctcctgaacagctgtctccaggcgtgcaccaccacacctggctaacttctgtatttgttttacagtcatggtttcaccatgttgcccgggctcatcttgaactcctgagctcaagtgatcctcccgcctcagcctcctaaagtgctgtgagccaccgtgtcccaacagtacttgtgtgtttccgttcaaattgtattgaggagcttttacagcatagcctgtggtctctccgggagaatgtttttgtttacgacaatgtatattcttcaacatcgtagattccattttggatgccctcattgggactgtgtgtccctgtactggaactcaagtgaacacttggctcaaaatccattgctgttctctagaaatccagcctaattctcttggttaaaggtaaggtatgagtagtaagcattgctttttctctttgggaacaaaactcaggaggattgccccttgatgaacaaagctaacctgttgattctttgagggaaggaactggagatggtccttttaggggtttatgttctggattctagaaaacacacaaaccggacaaataaatgcatctttatttttgtgtctattttaacctcgtcaaggaagattccaacaaaaaatccacagtgccggagcaagaagacctcaggctgtgacactctagagggaagcgctttctgttgtctgaaagaaaggaaagtgcatccttttagagtgttactgtttgagaaaagcaacattgaagctgatgctgatcttggtaataaatttgcagcgaatgcttataatcagacttggatgatgttgggcttctgagtttttttttgttttgttttgtttagttttggggtttttctgttttttgttttttgttttttttttttttgaggccgagtcttgctctttcgcccaggctggagtgcagtggcgctatctcggctcactgcaagttctgcctcccgggttcacgccattctcctgcctcagcctcctgtgtagctgggactacaggtgcccgccagcacacccggctaattctttgtatttttagtagagacggggtttcaccgtgttagccaggatggtctcgatctcctgacctcgtgatccacccgcctcagcctcccaaagtgctgggattacaggcgtgagccaccgcgtccagccttgttattgtttttgagactgagtcttgctctgtggcccaggctggagcgcagtggcgtgatctcggctcactgcaacctccatctcccaggctcaagcaattctcctgcctcagcctcctgagtagctgggattacaggcctgtgccaccatgcccggctaattatttgtatttttagtagagacagggtttgcaccatgttggccaggctggtctcgaactcctgacctcaggtaatccacccacgtcgatctcccaaagtgctgggattacaactgtgagccactgcgcccggcctgtttttctctaccacagggtgtctgttgcccaggctggagtgcggtggcatttttaacatagatctcttgggctcgagtggtccttttttttggttcagtcttgctttgtgacccaggctggagggcagtggcagaaactctcctcactgcaacctccgcctcctaggttcaagccattctcctgactcagcctcctgagcagctgggattaccggtgtgagccaccacacccagctaatttttgtatttttatttatttgtttatttatttatttattgttgagacggagtcttgctgtgtctcccaggctggagtgcagtggcgcgatcgtggcttactgcaacctcctcctccttggttcaaccaattctcctgcctcagcctcctgagaagctaggattacaggcatgcaccaccatgcctggctaatttagattccattttggatgctcccatcaggactgtgtccctgtactggaactcaggtgaacacttggttcaaaatccgtcgcttttctctagacatccagctcagttctcggtaaagataaggtatgtgtagtaggcattgctttttccctttagagacaaaactcaggaggattgccccttggtgaacaaggctaacttgcagattctttgaagcaaggaactggagatggtccttttaggggtttatgttctggattccagaaaacatgcaaacagggccaatacatgcatctttatttttgtgtccgttttgacctggtcaaggaaaatttcaacaagaaacccagagtgccggagcaagaagatctcaagctgtgactgcaaagggaagccctttctgttgtctaaaagaaaagaaagtgcttccctttggtgaattacggtttgagaaaagcaacgttgaagttgatgctgatctcggtaatacatttgcagagcatgcttatcacacttggacggtggtggggttctgttttggttttgcttttttattctaagacagggtctgtgttgcccatgctggagtgcggtggcacatcccacctaggtctcttggattcaaatggtcctttttgggggcagagtctctctatcaccgaggctggagtgcagtgatcccatcttggctcactacaacctccgcctcccaggttcaagcaattctcctgcttcggcctcccaagtagctgagatttacaggtgcccatccccacacctggataatatttggttttattcatgtatttatttatttttaagatggagtctcactgtcacccagactggagggcagtggcacgatctcggctcgctgccacctgcgcttccctggttcaagtaatgcttctgccttagcctcctgagtagctggaattacagaagtacaccaccacacctggctactttttatatttcatttttaatacagactggatttcaccatgttggctagtatgatatatattttgtcatatattcttatatatataatcatatacacacaaaatactcttctgcacacgaagagtattcttatatcgctttgggtttttttgtttgtgtgtttgttttgtgtttgtttctttgtttttgagacaacgtctggctctgttgctcaggctaaagtgtagtattgcaagctcagctcactgcaacctccacctcccacctaaagtcccctgaattagtgtctacaggcatgcaccaccacacctggctcacttttttttctgagaaggaattttgcttttgtcgctcaggctggagtgcaatggggtgatttcagctcactgcaacctctgactcccggcttcaagcaattctcctgcctcagcctcccaagtagctgggattacaggcatgcaccaccacacctggctaattttgtatttttagtagagatgggtttcaccttctttctcaggctggtcttgaactcctgacctcaagtgatccacctgcctcgacctcccaaagtgctaggattacaggtgagagacattgcacctggccacctaacttttgtagtttttttacagacagggcttcaccatattgcccaagctggtctccagctactgagctcaagtgatgctcctgtctcggccactgtccctcacccaaacttgtgtatttcttttcttttctttttttttttttttttttgagatggagtctggctctgtcacccaggctggagtgcagtggcacgatcttggctcactgcaagctccgcctccccagttcatgatatttttctgcctcagcctcccaagtagctggcactacaggcacccgccaccacgcctggctaattttttgtatttttagtgaagacggggtttcactggattagccaggatggtcttgatctcctgagctcgtgatctgcctgccttggcctcccaaagtgctgggattacaggcttgagccaccgcacccagcttttttgtttttttgttttgtttttttgagatggggtctcgctctgtcacccagcctggagtgcaatggcacgatctcggttcactgcatcctacccctcccgggttcaagcgattctcctgcctcatcctcccaagtaactgggattacaggtgcccaccaccgcgcctggctaattttttgtatttttagtagagacggggtttcaccgtattagccaggatggtcttgatctcctgacctcgtgatctccctgcctcagcctcccaaagtgctgggattacaggtgtgagccactgcacccggcctttttttttttttttttttttttgagatgggatctcgctctgtcacccaggctggagtgcaacggcatgatctcagctcacggcaacctccccctcccgggttcaggtgattctactgcctcagcctcccaagtagctgggattacaggtgcccacgaccacgcctggctaattttttgtatttttagtagagatggggtttcatcaaggtggccaggctggtctcaaactcctgacctcatgatctactggcctcggcctaccgaagtgctgggattacaggcatgagccaccgcgcccagcttctgtatttcttttcaaattttattgaggattttttatgtcctagcctgtggtctatcctggaggatgtttgtgtgtgagacaatgtatattcatcaacatcttagattccattttgattgcttccgtagaaactgtgtgtccttgtgctggaactccggtgaacacctggctcaatatccattgctcttctctagaaatccagcccagttctcttggttaaatataagatatgtgtagcaggcattgctttttctttccagagacaaaactcaggaggattgccccttgatgaacaaagctaacctgctgattctttgaagcaagtaactggagatcctccttttaggggtttatattctggattccagaaaacatgcaaacagggccaataaatgcatctttatgtttctgtccattttaacttgatctaggaaaattccaacaaaaaacccacggtgctggagcaagatctcaggctgtgaccttctcgaggaaagaagcactttctgttgtctgaaagaaaagaaagtgcttcctttcagagggttacggtttgagaaaagcaacgttgaagttgacgctgatcttggtaatacatttgcagagcgtgctgatcatcagacgtggataatggtggggttttgttttttatctaagacagggtgtctgttccccaggctggagtgcggtggcacttccaacttagatctcttgggttcaagtggccctctttttgggacagagtctcactctgtggccctggctggagtgcagtggcaggaacttggctcactgcaatctctgcctcctgggttcaagcaattctcctgcctcagcctccggagcagctggggttacaggctgtgccaccatgcccagctaacttttgcatttttattattgatttattgatttatttttgagacagggtctggctctgtcacccaggctatagggcagtggtgcgatctcggctcactgcaacctccacctcccacctcagcctcctgaatacctgtctccaggcatgcactaccacacctgcctaacttttgtattttttgtatagatgaggtttcaccatgttgcccaggctggtctcggacccttgagctcaattgctcctcccgcctgggcctccaaaactgctgtgattaatggtgtgagcaagcgtgccctactcttgtgtgtttctgctcaaattttatggaggagcttttacatcccagcctgtggtctatcctggagaatgtttgtgtgtgtgacaatgtatattcttcaacattttagattccatttggatgctcccatccggactgtgtgcccctgtactggaactcaagtgaacacttggctcaacatccattgctgttctcatgaattccaggccaattgtcttggttaaagacaaggtatgtgggctgggcgtggtggctcatgcctgtaatcccagcactttgggagaccgaggtgggaggatcacgaggtcaggagttcgagacaagcctgaccaacacggtgaaacccatctctactaaaaatacaaaaattagctgggcgtggtggctccaccagtaatctcagctacttgggaggctgaggcaggagaattgcttgaacccaggaagcggaggttgcagtgagctgagatcgcgccactgcactccagcctgggtgacagagcgagacttcatctcaaaaaataaaaaataaaaaggtatgtgtagtaggcattgctttttctctttgtagataatactcaggaggactgcctcttgaacaaggctaacctgctgagcctttgaagcaaggaactggagatggtccttttagggggttatgttctggattccagaaaacatgcaaatagggacaatgaatgcatctttatttttctgtccattttaacctggtcaaggaaaatttcaacaagaaacccagagtgctggagcaagaagatctcaagctgtgagtctacaaaggaaagcgctttctgttgtctgaaagaaaagaaatcgcttccctttggagtgttacggtttgagaaaagcagcgttgaagttgatgctgatctcggtaatacatttgcagagcatgcttatcacacttggacggtggcggggttctgttttggttttgctttgttattctaaaacagggtctgtgttgcccatgctggagtgcggtggcacatcccacctaggtctcttggatttaaatggtcctttttgggggccagagtctctctctgtcaccgaggctgaagtgcagtcatcccatcttggctcactacaacctccgcctcccaggttcaagcaattctcctgcttcagcttcccaagtagctgagatttacaggcgcccatccccacacctggataatatttgggttttttttttatttatttttaagatggggtctcaccgtcacccaggctgtagttcagtggcttgatctcggcttactgcaatgtatgccacccaggatcaagtgattctcctgccccagactcctgagtagctggaattacacgcacctgccactacacccggctactttttgaatttttttttttttttttaaagtaaagatgggctttcaccatgttggccaggctggtctcaaacccctgacctcaagtcagctgcttgcctcagcctcccaaagtgctgagaatacaaacatgagccactgcgtggccatcaacacctcttactttatggaaatttttctggcactggtatagaacctcacgtggggtcaggtggagttgaggggacctcagtttcccttgcagatgggatgtgcactgctcagcaagagcacagaggtggagtgcatggggcttcagtgtttattggggaaatgaagctaaaatcttcggtgtgtgaccaggagataaatgcatgagatggggatctcactatgctgcccaggctgaagtgggcttagatcctcctgcctctgcccctccccagtccttggtacatgggactacatgtgaatattaaccccccatgcacagacaagaagaaagtaaggactgttctttggttcatacctgaccccagttaaacatgtattttagataaacaatgtatttgaaatgtacttgaacaacaaatgatttgctgtttaggtgtgggcatctttttttttcttcctaactttaaatatgggactagtccaggtacggtggctcatgcctgtaattccagcactttgggaggcggagacaggaggatcacctgaggtcagttgttcgagaccagactggccaacatggtgaaacctcgtctgtactaaaaataaaaaaattagtgagacgtggtcttggtgcatgcctgtaatcccagctactcgggtggatgaggcaggagaattgcttgaggctgggaggctgagctttcagtgagctgagatcaagcctctgcactccagcctgggcaacagagtgagactgagtctcaaaaaagtaaaaaatcagctgggtgcgctggcaaacacttgtaatcccagcactttgggaggccgagacgggaggatcacctgaggtcatgttcaagactaacagggctgaaatagcaaaacctcatctctattaaaaatacaaaaattagctgggtgcagtggtgtatatctgtatttccagctacttggaggctaaggcaggagaatcgcttgaacccaggaggaagagatttcagtgagctgaagccatgccattgcactccagcctgggccacagagcaagattccatctcaaaaataaaataaataataaaaatgaaattaaatagataaaaataaatagataaatatgagaccatcatgaatttggatgtcacttttgtgcaggggccagggtaatctctgtcattccaattttttttatgtgcactgccaaagcaagcactcatgtgtaggaattattcttcctgtgagcatataatatatggaactttgagacagagtctcaaacatatataatgtatattttatcatatattctttatatataaaatatcatatagacacaaaatactgttctaaatacagagaatactctgatatcaacttgggtattttttgtttctgtgtgtgtgtattttgtttggttggttatttttgagacaaggtctagctctatcacacaggctggagtgtagtggtgcgttctcggctcactgcaacctccgcctcccacctaagcctgctgcattagtgtctacaggcatgcaccaccacacccggctcacttttgtattttttgtacacatggggttacaccatgttgccggggctggtctcgaactcctgagctcaggtgattctcctgtcttggcctcctaaagtgctgggattagaggtgtgagccaccatgccccatcggtacttgtgatttaggttcaaattttgatgagtttttatgaccaagcctgtggtctatcctagagaatgtttgtgtgtttgacaattcaacatcgtagagttgattttgggtgctcccattgggactgtgtgtccctgtactggaacttgagtgaacacttggctcataatccattgctcttctctagaaatccagcccaattctcttggttaaatataaggtatgtgtagcaggcattgctttttccttccagagacaaaactcaggaggattgccccttgatgaacaaggctaacctgctgattctttgaagcaaagaactggagatggtccttttagaggtttatattctggattccagaaaacatgcaaacagggccaataaatgcatctttatgttttcgtccattttaacttgatctaggaaaattccaaaaaaaaaaacccacggtgctggagcaagaagatctcaggttgtgaccttctcgaggaaagaagcactttctgttgtctgaaagaaaagaaagtgcttcctttcagagggttacggtttgagaaaagcaacgtcgaagttgacgctgatcttggtaatacatttgcagagcgtgctgatcatcagacatggataatggtggggttttgtttttgttttatttttttatctaagacaaggtatctgttgcccaggctggagtgcggtggcacttctaacctagatctcttgggttcaagtggccctcttttcgggatagagtcttctttgctctgtggccctggctggagtgcagtggcaggaactcggctcaccgcaacctctgcctcctgggttcaagcaattctcctgcctcagcctgtcgagcagctggggttacagacatgtgccaccacgcctggctaatttttgcatttttattgtcgatcgattgattgatttttgagacagagtctggctctgtcacccaggctgtcgggcagtggtgcgatcttggctcactgcaacctccacctcccacctcagcctcctgaatacctgtctacaggcatgcacaaccacaccttgctaacttttgtattttttgtacagatgaggtttcaccatgttgcccaggctggtctcggacccctgagctcaagtactcctcaaacctgggcctcctaaactgctgtgattaatggtgtgagccaccgtgccctactcttacttgtgtgtttctgctcaaattttattaaggagcttttatggcctcgcctgtggtctgtcctggaggatgtttgtgtgtgtgacaatgtatattcttcaacatcttcgattccattttgggtgcctccatggggactgtgtgtccctgtactggaacgcaagtgaagacttggctcagagtccatttgctgttctctagaaatccagcctaatcctcttgtgcaaatataatatatatctagtaggcattgctttttctttctggagacaaaacacaggaggattgccccttgatgaacaggactaacctgctgattctttgaagcaaggaactggaaatggtccttttagggatttatgctctggattccagaaaacacgcaaacagggccaataaatgcatctttatttttgtgtccattttgacctggtcaaggaagattccaacaaaaaatccacagtgccggagcaagaagatctcaggctgtgtccctctacagggaagcgctttctgttgtctgaaagaaaggaaagtgcatccttttagagtgttactgtttgagaaaagcaacgttgaagttgatgctgattttggtaatacatttgcagagcatgcttatcatcagacttggatgatgttgggttctgtttttgctttgtttttttttccaagacagtgtgtttgttgcccaggctggagtgcggtggtacttcccacctagatctcttgggctcaagaggtctttttttatttttctttctcaagagagagtctggtggtgacacccaggctggagtgcagtggtgcattatcagctcactgcagccttcccctccccggttcaagtgattctttcacctcagcctcccgagtagctgggattacaggtgtgggctaccacacccggctaatttttgtatttttagcagagacagggttttaccatgttggggaggctggtctcaactcctgtcctcaagcgatccacctcccttgcctcccaagtactgagattacaggcgtgagcaactgcgcccggcctcaagtggtcctcttaagtcagcctaccaagttttgggactacatggggcatgccaccacacttggctaagtttttaatttttttttttttttttttttttttttttgagacggagtctcactctgtcgcccaggctggagtgcagtggcaagatctcggctcactgcaagctcggcctccggggttcacgccattctcctgcctcagcctcccgagtagctgggactacaggtgcccgccaccacgcctggctagttttttgtatttttagtagagacggggtttcaccctgttagctaggatggtctcaatctcctgacctcgtgatccacccgcctcggcctcccaaagtgctgggattacaggcgtgagccaccgcgcccggccgatagtttttaatttttgatagaaagggaatctctcttgcctaagatggtctcaactcctgagctcaagggatcctaaaggtgtgagccgccttgtcctgatgacccatttcaaacgtagctgacatggccaggcatcatggggcacacagtcccagctactgcagaagccggggtgggagggtcctttgatttccaggctataccatgtgctgatcacacttttgatcccgagtagctgggattacaggcagccaccgccaggccggctaatttttatttatttacttattttttcagacggtgtttccctcttgttgcccaggctggagtgcaatggcatgatctcggatcactgcaacctccacctccctggttcaagcgattctcctgcctcagcctcccgagcagctgggattacaggcatgcatcaccacgcccggctaattctttgtatttttagtagagatgggatttctccatgttggtcaggctgatcttgaactcccaaccttaggtgatccacccacctcggcctcccaaagtgctgggattacaggcatgagccattgtgcccggcccatttcatttatttttatgtgtgctgctgaagcaagcacttatgtgtaggaattgttcttcctgtgagcatatgttggccagcctggaccacataccaagatcccatctctttaaaaacacagattacgtggcacctggcacctggtcccagagacttcatttgggttggtcatttgaaacactagcctcccatcaatttagtgtaatcaatccaaatcatgtgtccttcattaagagactaagaacgcctccacgtctatccagtctattttgtaatccccaacggttgtcaatattaataaaatttcttttctttttcctattcatttgtgtctttagtttttcttccccaaaaacttgccatcatttctcggaatagacctgctttctctgcaggaagggtgtggttgattcaacccttacccactaatgccaaccccagtgagttcttttatcctattttctatgggtaacgattccaaggtaccattccaccgggcaaaagctcacatctaagtgtcagttgctcggtaagatgtgaaatgtttgctgtggctaatataagaaacaaactattgtagacaagatgaatctcagtggcagtgataaatgtcgcacaagacaaaaccacagatcctttttttttttttttttttttttagacaaagtttcactcttgttgcccaggctggagtgcaatggtgcgatctcggctcactgcaacctccgcctcctggaggcgattcaagcgattctcctgcctcagcctcccaagtagctgggattacaggcatgcaccaccacgcccaggtaattttgtatttttagtagagacggggtttcgccatgctggtcaggctggaactcctgacctcagatgatcctcccacctcagcctcccaaagtgctgggattacaggcgtgagccactgtgcccggccaaccacagatactttcacgaaagcctttagggccctagaaggggctccctagtaacaggtgggatgcgaggcagctctcgttgttgccgtagtgagcgatgcctgttcgtccagccctcaacaccttttactccgtggaagttatgcctgcactggtttacagaacctcccttgacttgggttgaggtagagctgaagggaacctcagtgtcccttgcaggtgggatgtgcactgcttagcaagagcacggaggtggagtgcatgggctttgagtttttattgggaaaatgaagctgaaatgtagggcgcatgaccacatcataaatgcacatttgatttaatttttctattttatttttatttatttattttgagatggagcctcgctctgttgcccaggctggagtgcactggcctgatctcggctcactgcaacctccacctcccgggttcaagcaattattgtgcctcagcctcccaggtagctgggattacacgcatgcttccacgcccggccgatttttgtatttttagtagagacggggtttcaccatgttggccaggctggtttcaaaatcctgacctcaagtgatccgcccgcctcggcctctcaaagtcctgagattacaggcgtgagccaccatgaccagcctaatttttctattttagagacagtggtctagctatgccacccgggctaaactaggctttagagatcttcctgcctctgcccctccacggtctctggtagtttggactacaaatgaacattagcatatttgcaaccaccaccactctagtttggaagatttttatcaccccaaagaagcttatacccatttgccttcagtacccacccccctcttccactcagaccctggcaactactctacatctctctagctctggatttgcctcttgtgggcatttcacaaaaaccagtcttgaatgggtggcctgttgtgaccacttttaatataatgggttggttctggttgtctgaagtgtgaatcttgccaatgaaggatggtccctggatggaagcaggaggctgggagaactgggcggaacatcctttcggaatggagtggggtgggcacaccctgatgtctgggaagctcacaagggtggaagaacccatcttcctctctgataactgcaaggtgaccctcctggggcactggatggagtgaaggcatctggactgggaacaccagggcattgcactggtgcaggcaggatgagccgaggggaaaggagtgccaggcatcattctctggtgacagtttgggtttgatctggatggagcaggtgtcttctggtagagagagtccctgggatttttgctctgctcctggctgtctttcagtcatggaatctgatgacaaaggctcccactctgggccacttcatttggtttctggagcccagtggtcctttctgcccggactcaggatcttttggggaaatttgggacctcgcaggacatctgcacaatccatagaaatccctgagagccccttccctttgctgacatctccgtattcctacctattgccttccaaaaaaagacccttatctgaattgccaaagggggcttcccagagcagggaaacccggttaaatttgtatttcagattaacagcatatctagaatctactcgaacaagaagtgatttgttgtttaagtgtgagaaatttttttcccctaattttaaatacggaacccatcatgaatttggctgtcacctttgcgcaggggccgtgggaacctatcatttcattgtttaatgtgtgctgccaaagcaagcacttaagtgtgggaattattcttcacgtgaggatacaatagatggaacgttattacttttttctttcataattgagattttattggttgaagatcggtacagacatttcaatttgtacacaattcttaacatacgtaccgaaaatctaaaaagccatgtattgtaaatcgttttgttttgttttgtttttttgagacagagtttcgctcttgtcacccaggctggagcgcaatgacgcaatctcggctcaccgcaacctccgcctcccgggttcaagcaattctcctgcctcagcctcccaagtagctgggattacaggcaaatgccaccatgcccggctaatttttgtatttttttttttttaagtagagacagggcttctgcctgtcggtcaggctggtctcgaattcccgacctcaggtgatctgcccgcctcggcctcttaaagtgctgagattacaggcgtgagccaccgcacccggccatgtattgtaattcttctacaaagttattccggcgactttccagcttaaaatttggaagcacattttccttaagaggctatcaagtaccagtatcttcacatgttgatcagctgttacggacgtccctccaattcacaactaaaaatagcatgtaccctacatattcaaatttttcatctttcacaacgcagaaacaaacttattaggagaacagaactaccacaatcaaagatgttacagagtccacacaattctaacagggagagccatggtcagggagtggttttctttaggaaacaattccaaaatacgacaggagaatagaagtaatttaaaatgttcaagacactaaatgcagagctgattccatgctgccatttaatatgctttgtattataggatataaacacgaaccctggccgggtgcagtggctcacgcctgtaatcccagcactctgggaggccgaagtgggcagatcacctgaggtcaggagttcaagaccagcctggcccacatggtgaaaccccatccctactaaaaatatgaaaattagccaggcatggtggtgcgcgcctgtaatcccagctactccggatgctgaggcatgagaatcgcttgaacccgggaggtggagattgcagtgaactgaaatcacgccactgccctccagcctgggcgacaagaacaagactctgtttcaaaaaaaaaaaaaaaaaaaaagtttctggaactactaaaaaacttgcatttacaaaatagttgataaaaagattcctctgggttttacaagaagcgagacagggagcactgatgagacgtggtatacggtgaatcagactgggcatcagaggctgggcctcctcagttttcctttccccattttctgcagataaatctttagtttcttggttagccacttctgcccgttttccctttgctcccctttgcccttctgttcacacttttttgtctgaagatgtatccttcgttgctgcctttttcggcttcatttccactggtttttttgttttgttttgttttgttttgtttgagacgtagtttcaccctgttgctcaggctggagtgcaatggcgtgatctcggctcacagcaacttctgccttccggttcaagcgattctcttgcctcagcctcccgagtagctgggcttataggcgcgcaccgccatgcccggcttatttttgtatttttagtagagacgggggtttcaccatgttggccaggctggtctcgaactcctgacctcaggtgatccgcccgcctcagcctcccaaagtgttgtgattacaagcgtgagccaccgcacccggccttgcttccacttttgcaggagcaggtttagctgacaaccgtgcgatctcctcgtgggctcttccttggcggcccctatggcggagctaacctgcctcttgggcatcctggtggcggagagggcgcgtgccggctgtctgcgggccgcggctgccgagagccttggcgaagctgggctgcctggcggctgcggctcctcccgccgcccgagctgctgagacccacagcggggtcggtgggagaaccgaatggaacccgaaactttcttattttgagacaggatctggctctgtcacccaggctggagtgcttggctcactgcaacgtctgcctcaagtgatccttccacctcaacctcccaagtagctgagattacaggcgcgcgtgccactatgcctggctaatttttgtactctttgtagagatgggggtctcgctatgttgcccacgctggtcttgaactcctgggctcaaatgatcctcctggcctggcttcccaaagtgctggttgtaacgccagcagtttgggaggccacagtcggcgggatggattagctagcaacaaacattccaggcagagaatggtgctctctcaactctcagtcagcaaggggctagtatatattgaaggggctcagggcatgtcaccccaaagtcatcgcgtcagcatatggattatttcgacctggaagcctgtgggaaaaagcagatgcatctgacctcccccttcctacgtaaaagtagattgtaaaatttatcaagaggaaaacgcccttcctgcgccaggaagagaagaatgttcctatcagcaggggccaggagtccatatgctaaacaactcagctactaacccttatcttccttaagttccccactgtttcctggtcacttcccctagcccaagcctctttgtcttgtcacatccccacaacttatcattccttttttttttttgaggtggagtttagctcttgttgcccaggctagagtgcgatggcgcaatcttggctcactgcaacctctgcctcccgggttcaagtgattctcctgcctcagcctcccaagtagctgggattacaggcgcccaccaccacgctcggctgattttttgtatttttagtagagatggggttttgccatgctggccaggctggtcttgaactcctgatctccggtgatccgcccgcctcagcctcccaaagtgctgggattgattacaggcgtgagccaccgcgcccggccatcattctcttttttgttttgttgtggttgttgttgtttgagacagcgtctggctttgtcacccaagctggagtgcagtggcgccatctcagctcactgcgacctctgcctcccgggttcaagcaattctcatacctcagcctcccgagtagctggaaccacaggcatgagccaccatgcccggctagttacagggttttcctatgctctccaggctggagtgcagtggcgcaatcatagttcactgcagtcttcaactcctgggctcaagcaatcctcccacctcagcctcttaaactgctgggattacaggtggtagccatcatgccctgccccagagaagtctttaggcttcagccaggcacggtggctcaggccggtaaacccagcactttgggaggctgaggtgggaggatcgcttgtgcccaggagttgaaggctgcaatcagctatgactgcaccacagcactccagtctgggcaacaaagtgagaccctgtctcaaaaaacaacaccgtaggcccagcacggtggctcctgcctgtaatcccagcactttgggaggccaaggcaggtggatcacttgaggtccagagttcaggaccagcatgaccaacatggtgaaaccccgtctctactaaaaatatacaaattagccaggtgtggtggcagacacctgtaatcccagctacttgggagactgagggaggataattgcttgaacccgggaggcggaggttgcggtgagccaagatcgcgccattgcactccagcctggttgacagagcaagaccctgtctcaaaaagaaaggaaaagaaaaagaatacaccagaaggtacccagagaggccagtgtggatgtacagccagcacataagatgctggttagggacaggcgcagtggctcacgcctgtaatcccagcactctgggaggcccaggcagggggatcacctgaggtcaggagttcaagaccagcctggccaacatggcgaaaccccgtctgtactagcaaatacaaaaattacttgggcgcggtggcacgtgctataatcccagctactccggaggctgagggtggaaaattgcttgaacccgggaggctgaggttgcagtgagccgagatcgcaccactgtactccagcctgggcaacaagagcgaaactccgtctcaaaaaattaaataaataggccgggcgcggtggctcacgcctgtaatcccagcactctgggaggccgaggagggcggatcacggggtcaggagatcaagaccatcctggccaacatggtgaaaccccgcctctactaaaaatacaaaaacttcgccctgtatggcggcacacggctgtattcccagctactcgggaggctgaggcaggagaacggcttgaacccgggaggcagaggctacagtgagccgggatcacaccgctgcactccggcctgggcagcaagagcaaaactctgtctcaaaaaacaaaaaacagaaaaacaaaaagaatcaagtaagtcgaagccacactgataacagccaatttttgtgaaccaagggagtgtcaattcaagaatttacatagatgtctacttttgctatctcctatgtgccaagcaagatacaggctctgggcaatcagaaacaaaagagactcactcgttcctctcacagtactcagtccttactgagataaggacaaaagaaaatgtcctgtctggaatgcagggaaaccagaacttcaggtcaggggacatttccattgaattgtgtggagttgaagctgaaaatacttttttttttttttttttttttacatcacggcatggtttattacgtgatttttttactatacaaacaaaaaatacagaaatgcaatatgtgaatacagctaaatgcagaatggtgacttttttctcttcaagaggccatgattcccatttctagtaaaataaagagaccgcatacaggttggttgtgagattcacaattttgcctagaaatgatctataaatgcatttttcccccctgctacctaccgtaaatcgtaaaaagggagttaaagcaaagtttccttgttggttcctaccatatggaagatgctatattctattttagcagggtcaatatttggaaaatatctaaattaaatattattacaaaaatgaagctgtaatgagattctggctaaagagggcactaaatgagaataatatatatttaaagaatccaaaacaaacaaacaaaaagaggttattataaaaagctctaggtgcactgtaagcatatagggtttttttttcatgtgtttttttttaaacaatggaagtgtcaaaaatagggtcaactgtgttagactaaattacattattgtatatgctgcattgaatggaacctttgtattataattatcatagagaagcacagtttgcatcatattatggcaattcatcgtcaatgaaaaccttccagagtccttttattttggaatctcctgtaaactatcaaaccaccagaacatgactgtacaacagtaaaatgttctcttgcattaaactgaagagacctgtttaataaaaaaagaaaaagaaaatgtaggaaaggtacttagagctgttactttctaagtacacaacaccctagacaattcgaggcatcttaatctccatcaagaacaacaacaacaaaaataatttttgtcatgttgttaaatccatcattatggatcaaactggtgcaacttggtcaaatgaatccaacaaacactgatgtccaagctggcatattggcaactaatacacaactggtggtcaatagagagtttaaaagatcttccctttcttgttgttcttttccaaggttctcaaagagttctgttgctctaaaatacgttgttgagcttcccagtttgctttctcatcctcaaactgacgacgtttctcctctaattctttgtgccgtgctcccaaattctttttcagttgcacatggcactgctggagctaaatcacagcacaatatataccccaaggatactgccttcctctgaccctttttccattaacttcagtgataatatcactacccaccacagcaagaggtaaacggtcctttatctttttaacacgtttcttttcttcttcatcatctgtttctggaaattcatatattttaattttatgttcttggatttctttcattatctgttttgtaaactgttgacattcctctggtgtgagtgtgtctgctttggcagtaagtgggatgatattcactttttcatgcaaatgtttcataaactcaacatccagtggtttaagtctcaacaaaaggcaatgtcaagtagttacaaacatgcactacccaatcctgcctgaaggtgggagtcttcagttatgtaatggtcctgttatcaggcatctgacgtctgctcactcgcgattctgcatttaggtagtcctcaaatttactatcaatgtaatcgataacaggctgccagcaattactactatccactgcatctccaaatcctgaggtatcaactatcctgagcagcaactaaacaccaccttctttgattaaaactttggattgttccatccaggcttctattttcccatagaggtccaaaaaacgcccttgtttgttaagttgatatatgtaaaccttttctccaggctgttccttgaggtttacataattgggaactccttcaagcatctgtaaataaaccttttcagctgtagatctctctattttcagttaatttgcagaccaccaactataggagccaagttgaaagagaaaaaagtttctcttcccagcactttctttaggatgcttttcattgcttcccaactggaggcctcgcccctccacccacctgccctagtcctcagctgcctccagttctgtccacttaaatacagactcccggtagtagagaacttttttaaaattttattattattattattattattattgacacagtcttactctgtcgtccaggctggagagcagtggcacaatctcagctcactgcagcctctgcctcctgggttccagcgattctcctgcctcagcctcctgagtagctgggattacagacacccgccaccatgcccggctaatttttgtatttttggtagagacgggggtttcaccatgttggccaggctggtcttgaactcctaacctcaggtgatcctcctacctcggcctcccaaagtgctgggattacaggcgacagccaatgtgtgcacggcccaggtattaaggaattcaatctctatttctcaccaatgaattaggctctggaagttagtagattttaacaaatacttgttaagctaagttcttctcaaaggtctttaggaatattcagtaaaagaggactctgttaactgaaaaccagttctgttccagtaaatcctcaacagatggagaaaatgagactatgccccaccctttccccttagggcctccacattgattagaggaggaattctccttttaatgactgactgagctatcactcctctctgtcagtaaaaacagcagcaaaaaaaatgtcttggctgggcgcagtggcacatgcctgtaatcccagctctttgggaggccgaggtgggcagatcacctgaggtcaggagtttgagaccagcctggccaaaaccccgtctctactaaagatacaaaaattagccgggcatggtggcaagtgcctattgttgtacctgagcgagttagaaaaacgccacactttgagacgaattaagagtcctttattagctagcgcctgagagacgtctaaggcttaaaattctctcagcccggaggaaggggcttgattaacttttataccttggtttaggaaggggggggcgtccagttaaaacaattttacagaagttaagtaatcaaaaagttaaaaggataaatggttacaggaaagtaaaacagttccaggtgcaggggctttaagactattacaaggtgatagacgcggggctttgggcgttatcagtcagacgaattcttggggactgcggatatagcttgccacagtatcttatcagttaattgcattcttggatgtgctggaagtcagcttgcacaagttaagtccttgaggaagggactgccagtgaaagagccaagatggaatctgtctggctttcttagcttagggagagtcagttcaggtggaaacaaggctaggtgattaaaggaaaagggagagtctaaaaacagggttagtaaaaaccaggttgggtattacactataatcccggctgcttgggaggctgaggcgggagaatcgcttgaacctggaagatggtggttgcagtgagccgaggtcgtgccactgcactccagcctgggtgacagagcgagactctgtctcaaaaaaaaaacaaatttcttggccaggtgctgtggctcatgcctataatcctagcactttgggaggcccaggccggcagatcgcttgaggtcaggagttcgaaaccactgtggccaacatggtgaaaccctgtctctactaaaaatacgaaaaagttagctaggcgtggtggcagacgcctgtaatcccaggtcctcgggaggctgaggcaggagaatcgcttggacccggcaggtggaggatgcagtgagcagagatcgcactacttactgccctccagcctgggcgacagagtgagactctaacaacaacaaaaaaaaaaagaaaaagaaaaagtaaaagaaaattctgacatcaagctcattgaaatgtattcttccctttcctcagctgctgccaaggtgctcggtccttccgaggaagccaaggccgcgttgcagtgaggccctcacttcatcccgcgactagcaccacgtccggcagtgccagccccacactcgcccgcgccatggcctctgtctccgagctcgcctgcatctactaggcgctcattctgcacgacgatgaggtgaccgtcacggaggataagatcaatgctctcattaaagcagctggtgtaaatattgaacctttttgacctggcttgtttgcaaaggcctggtcaatgtcaacatcgggagcctcatctgcagtgtagaggctggtggagctgctccagctgaggagaagaaagtggaagcaaagaaagaagaatccgaggacggtgatgatgacatgcgctttggtctttttcactgaacctctttttataaagtgttcaataaaaagctgaacttcaatttaaaaaaaaaagaaataaatgtattctttgcatctggcatagtgtgcccagcgcgtgtgatcccagctatgcaggaggatcatttgagtccaggagttccagtccagcctgggttaacaggtagaaccccttctctggaaagaaaaaaatgtaaaaaggcattctttgtgtattatttttttgaaacagggtctccctctataccccagactggagtgccttggtatcatcacagcttactacagccttgacctcctgggcccaagcagtcctcccacctcagtccccggagtagctgggaccacaagtatgcaccaccatgcccggctaattttttatttattattctctttctcttttctttttttttttttttttttgagatggagttttgctcttgttgcccaggctggagtgtaatggcgtgatctttgctcactgcaacctccgcttgctgggttcaggtgattctcctgcctcagcctcccgagtagctgggattacaggcacctgccaccgtgcccagctaatttttgtatttttagtagagacggggttccaccatgttggccaggctggtcttgaactcctgaccacaggtgatccacccgcctcagcctcccaaagtgctaggattataggagtgagacaccatccccagcctaaataattcttttttttttttgagacagagtcttgctctgtcgcccaggctggagtgcagtggccctatcttggctcactgcaacctctgcctcctgggttcaagcgattctcctgcctcagcctcccaggtagctgggattacaggcgtctgccaccgtgcccggctaatttttatatttttagtagagacagggtttcaccatcttggccaggctggtctcgaactcctgacctagtgattcacctgcctcggcctcccaaggtgctgggattgcagtgtgagccaccacgcctggccatatatttttatatatatgtatatatgtgtgtgtgtctgtgtgtgtgtatatatatatatatatatatatatatatatattttttttttttttttttttttttttttttctaaagatgaggtctccccatattgcccatgctggtctcaaactcctggcctcaagccatcctcccaccacggcctccaaaagtgctgggattacagatgtgatccgctgcatagggccaaaaaaccccaccttcttttgggggttaataggcacctgaagccaataataataaaataataaaaataaaaaagaaaccaataataataggtcgggcacggttgctcatgcctgtaatcccagcactctgggaggctgaggcagggggatcacctgagatcgggagttcgagaccagcctgaccaacatggagaaacctcatctctactaaaaatacaaaaaagttagctgggtgtgatggcgcatgcctgtaatcccagctactcgggaggctgaggcaggagaatcgcttgaacctgggaggtggaggttgcggtgagccgagatcgcgccactgcactccagcctgggcgacaggagtgaaactccatctcaataaataaataaataaataaataaataaataaatgggcacctgaaatctctttttccgaagttgcgaattatccaattcatgccttagaatttagtcacatttccaggcctgtcccctgacttccgtttccatttcctcagtgatgtcccccaacctctctgcagatccaagcctcttcattgaggccattttacacatcagcaccatccaacagaactttttttttttttttttttgagacggagtcttgctctgttgccaggctggagtgctgtggcgcaatctcggctcactgcaacctctgactccctggttcaagcgattctcctgcctcagtctcctaagtagctgggattacaggcacatgccaccatgcccagctaatttttgtatttttagtagagacggggtttcgctatgttggccaggatggtctcaaactcctgaccttatgatccgcctgccttggcctcccaaagtgctgggattacaggtgtgagacatcgtgcccggcccatccaacagaactttatatgcaaggatgcacctgttctgtacctgcactattcaatatagtcctgatgtgggccaggtgcggtggctcatgcctgtaatcccagcactttgggaggctgagctgggcaggtcacttgagcccaggagtttgagaccagcctgggcaatatggtgaaaccccgtctctacaaaaaatactaaaattatctggacatgatggtgggtgtgtgtagtcccagctattcaggaggctggaggtgggagaatctcttgagcccaggaggtcaaagctactgtgagccgtgatagtgccactgcattccagccagggtgacagagtgagaccctgttttacaatatatatatatttatattttatatattattatatgtaatataaaaatatatatttatttatcctaacctccgaaagtgctgggattaccgtcatgagcccccaagtccagcctaattttatttttattttacatttatttatttatttacttatttatttattttttgagacagagtgtcgctcaggctagagtgtagtggcacaatctcggctcactggaacctccatctcccaggttcaagcaattctcctgcctcagcctcctgagtagctgagattacaggcacacaccaccgcgcccggctaatttttgtatttctactagagatggggttctaccatgttgtccaggctggtctccaactcctgacctcaagtgatcctccccctcagcctcccaaagtgccaggattacaggcatgaaccactgcacctgtcatatttatttattttcttagaaagagtctcactctgtcacccaggctaaactgcagtggcttgatctcagctcactgcaacctccgcctccctgggtcaagcgattctcatcctcagcctccccagtagctgggattacaggctcctgccaccatgtctggctaatttttgtatctttagtagggcggtttcaccatgttggtcaggctggtctcgaactcctgacctcaagtgatctgcctgccttggcctccgaaagtcctgggattacagctgtgagccactgggcctcaccttttttttatttttctttttcagacagagtctcactcggtcgcccaggctggagtgcagtggcctgatcttggcttactgtaacctctgcctcctgggttcaagcgattctcctgcctcagcctcccaagtagctgggattacaggctcctgccactacgtccaggtaatttttttttgtatttttagtagaaacggggtttcaccatattggccaggctggtctcaaactcctgtcctcaaatgatctgcccgctttggcctccaaatgtgctgggattacaggtgtgagccactgtgcccagccctgtccacattttctagcaagcactctatcagccataactcttgagcatggaacccaaatataaattgtatggctctgagtgtctggcaaggcaggctctagaagaaggcagctggaagatggtgttcttgaccactgcagggttcggccactttagagataattgatagttccagtgaggacttattcaatagaaatataaaaagcaggccaagtgcagtggctcaagtctataatcccagcactttgggaggctgaggcgggaggatcgcttgagctcaggagttcaaaacttgcctgggctatgtagcgagaccctttctctacaaaaaataagaaaattaggcatggtggagtgcacctgaggtcccagttgctcagggggctgaggtgggagaatcacttgagcccaggagattgaggctgcagagagctgtgacagagtcactgtactctagcccgggcaacagagcaagactcaaaatgaagaaacagattttggctgtgcgtggaggctcatgcctgtaatcccagcactttgggaggccaaagtgggtggatcatgggtggtcaggagttcaagaccagtctggctaacatggcaaaatcccatctctactaaaaatacaaaaggtagctggacatggtgctgggtgccttaatcccagctacttgggaggctgagccaggagaatctcttgaacctgggaggcggagtttgcagtgaacccagatagcaccactggactccagcctgagcgacagagagtgagactccacctcaaaaaaaaaaaaaaaaaaaagctggccccgagcacggtggctcactcctgtaatcccagcactttgggaggccgaggtgggcagattgcctgaggtcaagggttcgagaccagcctgaccaacatggagaaacccccctactaaaaatacaaaaattagctgggtgtggtggcgtgtgcctgtaatcccaactactcgggaggctgaggcaggagaatcgcttgaacccgggaggcggaggttgcagagagccgagatcccgccattgcactccagccggcaacagagagaaactccgtctcaacaaaaaaaaaaaaaaaaaagaaaagaaacaaatttggagcatataccttgacagactcccccccttgaccaaactttacacaggctgtcctgagccctcctgactaggcctgggccttggctgctatcttatctttgaccttaccagcccactcttagcagagattcctgctgagttatctcttgactcttcccatctaactgcccctgatatctgatgaagtgcctcatccaccacctttgatgtaggaggccttggcccacctttagcaagaatcccgttaggccagttgaagcagaaatcctctgtccagggtgcctcctttgtaattttccatccatgaacccatctctctgttctttggctaaatcccatttttgcttcttcttttttttttttttgagacggagtctcgctctgtagcccaggctggagtgcagtggcgcgatctcggctcactgtaacctccgcctctccaggtttaagcaattctctgcctcagcctccagagcagctgggattacaggcgcgtgccaccatgccccgggaatttttttgtatttttagtagagacggggtttctccatcttggccaggctggtctcgaactcccaaccctgtgatccacccacctcggcctcacaaagtgctgggattacaggcgtgagccaccgcgtccggtcttttttttttgagacaagctggagtgcaatggcatgttctcaactcactgcaactttcgcctcccaggttcaagcgattctcctgcctcagcctctcgaatagctgggattacaggtgctcgccaccacacatggctaaattttgtatttttggtagagacggggtttcgccatgttggccatgctggtcttgaactcctgacctcaagcgatctgcccacctcagcctcctaaagtgctgggattacaggcgtgagccaccgcagcctttgtccactccttgcctcgatactgaggtcagcaaacattttctctaaagagctagatagtaaatggtttaggttttgtgggtcacgtggtctctgtcacaatttctcaactctgcaattactatagcaagaaagtggccatagggtcaggctctggctctcctgcaattcccacgctttgggaggcccatgcatgaggatcacttgagcccaggagtttgagaccagcctgggtagcatggcaaaaacccatatctactacaattgcaaaaaattagccaagtgtggtggcacaagcctgtagtcccagctactagggaggctgagacggggttgcttgagcccagaagttcaaggttacagtgagccatgatccagccactgcactccagcctgggctacagaggaaaactctggctctttatgaaataaaaatgaataaatagggtggggggctaggggagggaaaacattaggagaaatgcctaatgtaggtgacgggttgatgggtgcagcaaaccaccggggcacatgtatacctatgtaacaaaactgcacgttctgcacatgtaacccagaacttaaagtacaataaaaataaatagataatttaaaaatgaataaataaataagcagagcccagaggctcttttctttctttctttcttttttttttttttttgagacggagtttctctcctgttgcccaggctggagtgcaatggcgcgttctcagttcagtctcttccctttaatcccacatactcaggaggctgagatgggagggatacttgagaccaggagtttgagaacagcctgggcaacatggccaagaccctatctccagtttaaaaaaaaatgccaccacgcctggctagtatgtatatatagtatttattttgtagagacagggtttcagcatattgcccaggttggcctcaaactcctgagctcaggcaatctgccacccttcacctcccaaaatgctgggattatgggcttgggccaccacgcctggtctaatctttcttatacaatgtcccccccacacccccgaatcgaggatggacgccagcaccttttaggtgttccacatattaaaccatgtgtattaaatcttggagtgttaagaacacaggcaaacaaaataagcagccattaaccggggaaaggtttaatctagtctggcaagaatctttccttcctgaactcatcccattgcagaaaagatggataaaatggtaaattctccttaatgtcataaggaggtttatcatgcacccacccaaagtctgtagataaacagtgactgagagaaaaatgggattacaggaacgaatattgtacataaaaggatttctcaaactgttaggctgtttacaaaaaaaaaaatgctaatctcattgttatggggagctggggcagattatgcaaagggctgggtttcagggtgaggattcagggtgattatcatgacaaggaggtctattggtttgcaaacgatgacctttcagctcagcaggaagaacttctgattaggcaaaatttcctctatctgtccgctcctcccaagaagcacgggctatgaaatctcatgtcctaaatatttgggatttctgattccttctgttattttatgtatttatttattttttgagacggagtctcactcttgttggccaggctggagtgcagtggcatcatctgggctcactgcaacctccgtctcctcggttcaagcgattctcctgcctcagcctcccaagtagctgggattacaggcatgcgccaccacacctggctaattttgtattttagtagagatggggtttcgccatgttggccaggatggtttggaatccctgacctcaggtgatccacccacctcagcctcccaaagtgctgggattacaggctcgagccaccgcgcctggctgtcattttttttttttcaaagagctcatttaagagtaaagataaattgacacttaaagttcactaatagttaatacaattattacaatttgaggctttacgttaaatatgtgtgttgaattaccgcaataatacaagaccagatcaactatacttgtcaggtcagaatgaaaatctaagaagcgcatcttgaattttaaatttttttcaatttgatttttcttgtcaagcctggttgtggggggggaaggtcaagtcttaaactggtctcaccaccaatgttatcaattgtcaaaaaaaaagtcaaattgggccaggcgtggtggcttatgcctgtaatcccagcactttgggaggccaaggtgagaggttcgcttgagcccaggagtttgagaccagcctaggcaacaaagcaagaccagcatctccctctctctctctctcttctctctctctctctctctctcatatatatatatatatatatgtattttttttctttctttctttttctttttttgagacggagtcttgccctgtcacacaggctaaagtgaatggtgtgatctcggctcactgcaacctctgcctcccaggttcaagcatttctccctgcctcagcctcccgagtagctgggattacaggcgcccaccaccacaccgggctaatttttgtattttttagtagagacggggttttcttatgttgaccaggctggtcttgaactcctgacctcaactgatccgcctgcatcagcctcccaaagtgctgggattacaggaatgagccactatgcccagcccatctctatatttttaaacaaattatacaacaaaaaagtaaaatatcacattggatattttttctttattctttgtttttttttttttttgagacagagttttgctcttgttgcccaggctagagtgcaatggcgcgatctcggctcaccacaacctccgcctcccgggttcaagcgattctcctgcctcaacctcctgagtagcatgcaccaccaccccggctaattttgtatttttagtagagacggagtttctccatgttggccaggctggtcttgaactcccgacctcaggtgatccgcccacctcggcctcccaaagtgctgagattacaggtgtgagccaccgtgcccagcggatcttttttcttttcttttttctttctttccagggatggggtcttgctctgtcacctgggctggagttcagtggcaggatcaggcctcactgcagccttgaactcatgggctgaagagatcctcccacctcagctttccaaattgctgagattacaggcttgagccactgcctgcagtcctctttcaaatgcacttaaaaatcgtctttgactatactctttgttgaatgttgattaaattcaattgcactaataacattttttatattcaaaaatacaaacgttggccgggtgcggtggctcacgcctgtattcccagcactttgggaggccgaggcgggcagatcacctgagtttgagagtttgagaacagcctgaccaacatggagaaaccccgtctctactaaaaatacaaaattagccggcgtggtggcacatgcctgtaatttcagctattcgggaggctgaggcaggagaatcacttgaacctgggaggcgaaggttgtggtgagccgagatcgagccactgcactccagcccgggtggctgagggagactccgtctcaaaaaaaaaaaaaaaaagtcagcaatgaactcgctgtgctggcccaagggcaggagaagaaagccgcccttaaaggagaaatttgcaaagacaaaatgaggtgatgagaaaaagccgagttctaggaaatacccgagagatcatccaggtggttcacaaatagcagaaaatccaggtgcagtgtgagaggagtgagtaggttagataggaatctggatggctgagctgtaaggacataagcactgacctcccgcaaccttgacaaagatcaaagcaagaatttttttttttttgagatggagtctggctctatcacccaggctggagtgcagtggcgtgatgtgagctcactgcaacctctgcctcctgggttctagcgattctcgccaaacatgctatttgctgtctcatttctatctctcgccatcctttgcagcaaatgctgtacattttcattgatgaaggaactaggtttaaccagaaaggttgagcacgtactcccgcagctggctaggattacaaatgggaaggaaaccctggcctcctggggccccaagtcttccccttccttgagtcattcattattttgagcacttaccattttcaagcccctcctcacctctccaacacccacctttttgagttcctctctatgcctcaaggtcaaaggaactctagtggtttcattaaataaaatcagaaatgtttccgcttttttatcaaagttgctctcaaaaatgttcactgccgcactgtttttttcttttctccctctctttttttttttgagactaagtctcactctgtcgcccagaatggagtgcagtggtgtgatctcggctcaccgcaacctccacctccagggttcaaaggattctcccacctcagccccctgagtagcagggattataggtgtgagccacaccgcacccagcttttttatttttttaaaatttattattattatttttgagatggagtctcactctgtcacccaggctggagtgcagtggggcgatcttggctcactgcaacctctgcctcctgggttcaagcaattcccctgcctcagcctcccgaggagctgggactacaggtatccaccaccacgccgagctaatttttgtatttttagtagagaccatgttggctaggatggtctcgatcgcttgacctcgtgatctgcctgcctcggcctcctgaagttctggcattataggcatgagccactgtgcccagcctatttatttattttttgagacacggtctcactctgtccccaggctggaatgcagtggcacaatcttggctcactgcaacctctgcctcccgggttcaagcaattctcttgcctcagcctcccaagcagctgagattacaggtgcacaccaccatgcgtgggtaatttttgtatttttttggtagagacggggtttcgccatgttgcccaggctagtctcgaactcccggcctcaagtgatcgtccgcctcggcctcccaaagtgctgggattacaggtgtgagccactgcgctctgccaaaatactatatttaaatatttgttgagtggatgactggtggaatgattttcttctggttatttctctgtgttttccaatgtatttataacgaatacatgttggcgttactagtaatagggatcacctaatttctatttgaatcagtgtttgaaaaagtttatgaaggtgtgtctgactaaggcaagctaggatcaaagggagcagggtggcttggggcggagaccagggggaatgagagggtgggaaggggtgggctttaatcctatcaaagttgagtgggctctcaccctatataagaacgcagctgcagtgaaccttgttctttctggcagacctgaggtgtggacgtatcattggcctctgtgagtattgctatgttattttattttctttcattttactttattttttagggtcaggatctcactgtcgcccaggatgaagtgcacaggtaggatgatggcgccttgcagcctcgacctcctgggactcacccttttagcctccagtagctgggaccacaggcgcgcaccaccattcccatgtgcgtttttctgcttttttttttttttttttaggagagatggggttttctatgttatccaagctggtctcgaactcctgggctcaagagcaatcctaccaccgtagccttccgagtagctgggactacaggcttgagccactccgcccagccgggctgtacttttgttctatttctgtgattttttttcagtcttaaggacgaaggccccactgtccctcacacgtgttccttcctacttgcattgtactcagtcctcatggcttgcatctggaggctatgggcgggggagtgctttgaatatctatacgtggaaagccttgttttttactttttaagaaagggtcgttaaattcgtgctttgtagaccttcaacagctcatcaagggctactctccacctccttgcttaaaagcctcttctgatgggtaagtgcttccacttgcgatcgccgccttgccgcatcccctcagcctgtggcactcaaactgtgggggcactttctgctctctggtgaaagtgccgccatcttttgagtgttaccgcttgagaagactcaacctgcggagaagataccattttgattgggtgagggggcgggtagcaggatggccctagaccctgcctatggccgtttcctcgtgatataaatttcttggccggggctcttgcagatggagctgctcaccctgtgggcctcaaatgtggagcactattctgatgtccaagtggaaagtgctgcgacatttgagcgtcaccggtgacgcccatatcaacggatgccgtggagctcggtcttctgcaggaactaaagagcctgtggtttcgattcccagccggaaactgtcttgggtacaggtcccttacagcgtctggctgtaatggctccggaaaacctggggaagggaagggggcctcctgggctctcacctgacacaactaagggaatctgggttagatggtgaaaggaagagaaggttcagagggcggctgtgcgcctgcgccgggcgcggcggctcacacctgtaatcccagcacgttgggaggccgaggcaggcggatcacgaggtcaggagatcgagaccatcctggctaacacggtgaaaccccgtctctactaaaaatacaaaaaatgagccgggcgtggtggcgggcgcctgtagtcccagctacttgggaggctgaggcaggagaatggcgtgaacccgggaggcggagtttgcagtgagccgagatcgcgccaccgcactccagcctgggcgacagagcaagactcattctcaaagaaaaaaaaaaaaaaaaacagcagctgtgaccaaggggctgtatgcacaaagaaaggaatgctttttgctgttggtgttataattgatatgtaactttcctcttcccccatagcaagcaagtttattgctgacatttaacatgtgcttggatgattggaggccaacctcttgtaggcaagaaagtcacagtgatggcagatcctcgcgaggagctcatactgggatactcaaaatgggggcgctttcctttttgtctgtactgggaagtgcttcgattttggggtgtccctgtttgagtagggcatcacgaaccatcctgcttcaagggagcctgcgggtctgactgcagcttcagctatgacctggagttcccgggcttctctgcggggcaccagtctgtatgctccattttagataataaaaattggcatattctggggtgggcaggatacggggttcacctgcagatgaacagggcaggaaaagcttgatggggtgtcgggggaatctggttggccttaaagggaatttggggtcctgttcctgaatttggtaggcagcatgcatgtaaggcttgaagtgggtttggccagagcatgggctggagtgcttccaccctgctacacggacaatgccacagtctcacttttcctaacttttttttttaataaaatgtgaacaacatcatgtgtttctggtctattgggttcctctgccacccacaagtgctgggattacaggcatgagcctcatgtctggcgttactgaaccttcttctatgacccaagtacattgcctaaaaatacttgtcagtattttgtgcttcccttctacccctgctagaacttagagttatgctctttgagagttctgctctttaaacttcaaacaagtttaaaaagtaaggccgggcacagtggcagcactgccgaggccgacgcaggctgatcatgaggtcagatcaagaccatcctggctcacacggtgaaaccacatctctactaaaaaatacaaaaacattagccgggcatggcggtgggtgcctgtagtcacaggctgaggcagaaagggcatgaacccgggaggtggagcttgcagccagccgaggttgtgccactgcactccagcctgggtgacagcgataactgtctcaaaaaataaaaaccacccaggctgaagtgtggtggcaccatcacagctccctgcaggcctgagctccctagatcaaaagatcttcccatataagccccccctcaccccacccttagtagctggcaccacaggagtgtccccgccatgctccactaatgtttagtagaaattggggtctcatacattggccagcttggtctgaaacttagggggaatcaaacatccctcctttagtagagatggggctttactgtcttgccctgggtggcctccctgggatgatgggtgtgagccacagtgccaggcctaagttcatatttggaaggtttttttgcttcagatggtctcgtgctctcgctcaggttggagcgcaatggcgcaatcttggttcactgcaacctctgccagcttaagcgattctcctgcccccgcctcccaagtagctgggattacaggcataagccaccacgcctggctaattttttgcattttttagagatgggatttctccacgttggccaggctgctctggaactcctgaccccaggtgatccacccacctcggcctcccaaagtgctgggattataggcgtgagccaccacgtggggccttcagtaggttcttagttgctgtttgccctatcactggtttccgggtctgctggccactatcccctgtaagttttcctatcccctgtaggtgttccaaacccttgcggctgctttgcccactccacagtatctgaactgaagtaagatctcaaattcaagggagttttgttttgctatttgtacccgcaattcataaagcagttgtagcctctgtcccaataccgccaccactggtggggagtccgccacggtaaccagtaagacttctctttatatttgacctacctgggcctcctgtcatcttttctacgggcagcttggggattgttagttgagggttttttgtttttgtgtttttttttttgtttttttttttttttaaagagatggagtctcgctctgtcgccagactggagtacaatggcatgatcttggctcactgcaacttccacctcccaggttcaagcgattcttttgcctcagcctcccgagtagctggtattataggcacccaccaccatgcccagctaattttttttggatttttagtacagatggcgtttccccatgttggccgggctggtctcactaaactcctgacctcaagtgatccacccaccttggcctcccaaaattctgagattacaggtttgagccactgcgcccagcctttagttgagtttcttaagcttgtttagggtttagcctgtatggccagcagggtgtaggtgggggtggtttgtaagcagggctgtttgcttcagaagcagctgtggaaacaggactgaatgcagacatataaagaatattgggtaaataactttttaaaaaatttagagataggatcccactatgttgcccaatctggtcttgaaacctaaacaatctcttatcccaaagtgctgggattgcagaaagcttaaggcacagttttacgtggtaatggtgggccatttttagtttcttttttgtagacgatcatgtcatctaggctggaatgtagcggttctgtcgagctaggtgtagcctccacttcctggactcaagcatttttcctcagcttcagtagctgggtctatgcatgaataccccttctggggtagatagatagtagtacatagagtagataatttttttgtgttcaggcggcaccttaaggttggtgtaaaaattcttggccttctaaagagctggaattagacatgagctgttgcacctggccaatgggacaattatgtctacaggactgaatcagtatctgatctctggagttgtaaggtcactttttctgaaactgcctcagtctccttgcaggttctggtctgtagatctccagtgtgtgggctgagcacagcatggggacctgatttcccaccgggcagtgacatagtttaaagattcttagttcgaattcctaataatgggaatataggtttctgtgtattgaaatgggaatatgcattttttttttttttagagtcttgctctgtcactaggctggagtgcagtggcacaatctcggctcactgcaacctccgcctcctgggttcaagtggttcccctgcctcagcctcctgagtagctgggactacaggcgccctccaccacgccctgctaattttttgtattttagtagagacggggtttcaccatgttggccaggatggtcttgatctcctcaccttgtgatccacccgccttggcctcccaaagtgctgggattacaagcgtgagcctctgcacccagccaagggaatatggattcctcttttttttttttttttttttttttttgagacggcgtctctatcacccaggctggagtgcaatggcgtgatctctgctcactgcaacctctgtctcccgggttcaagtgattctcctgcctcagcctcccgagtagctgggattacccgcatgtgctatcacgcctggttaattctatatttttattagagacagggtttctccatgttggtcaggctggtcttgaactcccgacctcaggtgatctgccctccttggcctcccaaagtgctgggattacaggtgtgagccaccacaccctttttttttttttttttttaagatggagtctcgctctgtcgcccaggctggagtgcagtagtgcgatctcggttcactgcaacctctgcctcccaggtgcaagcgattctcccgcctcagcctccccagcagctgggactataggtgcatgccaccacacccagctaattttttgtatttttagtagagatggggtttcactgtgttagccaggatggtattgatctcttgacctagtgatccgcccgcttcggcctccaaagtgctgggattacaggcatgagccaccgtgcccagcctaatttttgtatttttagtaggtttcaccatgttggccaggctggtctcgaactcctaacctcagctgatctgcctgccttggcctccgaaagtatttggattacaggcatgagtcaccgcatctggcggtatttttgttgaaagcacagtgtataataggttatggccagcctacacgtggccttgtaggtgtcagttcttggcagggcccagtgaattccaggcagggggccatcctgacatgcctgccacgttaagatttcagacattatcccctccagcaagggaggatcagggctgttggcataacaagcattctgagggttagcttgcataccagtctcttcccaaatgctgagttgccccatgtatcctgtgacatttgagaataggctttcctcaacttggcacaatttgcctttggaccaagtgctttgtcctgtgcattccttgctggatgttggcatgcattcctagtgtcgtccactagatggcagtggcacccaccccagagctcaaatattactatgttccgatgcagccagggcttggcagggctgggtggcctctgagggcccctactggccatttttcaccgtctccctctgttgcccaggctggggcgcagtgatgcaatgacagctcactgcagcctcgacctcctgggctcaagcgatcttcccacctcagtccccagagtagctgggactacaggcatgtgctgctactcctgggtaattaattgtactaattaatagtagttggctaattagtaacagtggagtcttgctatgttgcttaggctggtctctaactcctagacttaagcaacccatcttgcctccacctttgaaagtacgggggttacaggcgtgagacaccgcacctggcccctgttgggatttacccctcctgttaggggccatcaaacctctcttagttggtcatcccttaaagctccgtcaaactttttttttttttttttttgagatggagtcccactctgtcgcccaggctggagtgcagtggcgcgatctcggctcactgcaacctccacctcccgggttcaagcgattctcctgcctcagcctcctgagtagctgggactacaggtgcccgccaccatgcctggctaatttttttttatttttagtagagacagggtttcaccatcttggccaggctaatctcaaactcctgacctcgtgatccacctgcctcggcctctcgaagtgctaggattacatacatgagccaccacgcctggccagctctgtcaaacattaatttgatcccaagcagagggacttttgatctcaatctgcatgagtctgtctctaggaaggaggctgatcattatgctgggggggtgatgagcaccctcccatcttcctctgtccagatctcaggggagagccagcagataggaccattcagcagccaatgtccaaataaggttttgttactcgaagcgctgccaacctactgtgggtcattttattcaggtccatcccaaataacctgtggacacaagagttgatattattccagtgtactactgtggcattcaattaataagccttaagtatctattgtgcactaccgtggtaagataattccatgatcctccagaaattccacccaacgctgctggaaagtaggcttactacatgctacatgcaagtccccaagctgtgttaactgcataatttttttttttttgagacacagtctcattctgtcacccaggctggagtgcagtggtgcaatctcagctcactgcaacctccacctcccaggttcaagcgattctcctgcctcagcctccccagtagctgggactacaggcgcccaccaccacgcccggctaattttttgtatttttagtagagacaaggtttcacccgtgttagccaggatggtcctagtctcctaacctcgtgatccgcccacctcggcctcccaaagtgctgggattacaggtgtgagccaccacacctggccaattcataatttatcatagccttatgaagatgcaactatgttctccattttttttttctttccccaagatggagtcttgctctgttgcccaggctagagtgcagtggcatgatctcagctcactgcaacctccgcctcctggcttcaagcgattctcctgccttagcctcccaagtagctgggattacagtcacgtgccaccatgcctggctaatttttgcatagagccacccgctcccagccgtaagtttttgtatttttagtagagatgtggttttgctatgttggccaggctggtcttgaactcctggcctcaagtgatttgcctgccttggccttttttttcttgagacaagttcctgctgggtcacccagtggcgtaatcatggttcactgcagccttgaactcctgagctcaaaggatcctcccacctcagccccctgagtagctttgattagaggtgtgtgccaccatacctggtgtgtgcgtgtgtgtgtgtgtgtgtgtgtgtgtgtgtaaagaaagcaattttcctaactcagcctgtcaaagtactgggattacaggcgccatcccctgcacccagcctaaactttgattgcatcactgcactccagcctgggccacagcaagatcctgtccaaaaaaaaagcaattggagtttgaacccaggcagagtaattctagattctcactcgaatcacagtgacctccaatgcaattggtgagccacgatggtccccttcaacagacaaggaaattttttttttttgagatggagtctcactctgtcacccaggctggagtgcagtggtgtgatcttgggtcactgcaagctccacctcccgggttcacgccattctcctgcctcagcctcctgagtagctgggactacaggcgcccgccaccacgcccggctaattttttgtgtttttattagagacggggtttcgccattttagccaggatggtctcgatctcctgacctcgtgatccacccgcctcggcctcccaaagtgctgggattataggtgtgagccaccgcgcccggcctcagacaaggaaattatccaaggtcacacagccagtagatgacatagctaatatgtggcctcatctgtatgccccctaattgcatacaccagtgcataacgtatttgtccatccagcttatctaccctcatgctcccagcccaatgtccagcctcctccagaaagaactggtcatcatccctcaccagaggactcggagtttgcagccaggatggctcagccgcttgcaaagcagtcggacacctgtgtcccctagggcgttgttggtcaggtaaaggtcggtcaaggtctggttgatccccagggtgaagtaaagattctcacaagccttggctgtgaggccacagctatccagcctggtgaagataaggagttggttaaggtaacaccaggggctacttatgttattcggaggcagtgtctcaccctgtctcccaggctggagtacagtggtgagatttctgttcactgcaacctccgcctcccaggttcaagcgattctcctgcctcagcctcctgagtagctgggattacaggtgtgcaccaccaccaattagcatggctaatttttgtatccttttatttttgttttgtttgagatggagtctccctctgttgcccatgctggagtgctgtggcatgatctcggctcactgcaacctctgcctcccgggttcaagtgattctcctgcctcagcctccccagcagctgggactacaggcgagagccaccacacccaactaattgttgtattagtagagagagggtttcaccttgttggccagaatggtctcaatctcttgacctcgtgatccgcccgcctcagcctcccaaagtgctgggattacaggcatgagccactgtgcccggccgtaatttttatatctttagtggagaggggatttcaccatgttggccagactggtctcaaactcctgacctcaagtgatccaccaaccttggcctcccaaagtgctgggattataggcgtgagccactacgcccagcctctgaaacattttaaaaaattatctgggttaggccgggcgtggtggctcacgcctgtaattccagcactttgggaggccgaggcaggcagatcacctgaggtcgggagttcaagaccagcctgaccaacatgagaaaccccgtctctactaaaaatacaaaattagccggggtggtggcgcatgcctgtaatcccagctactcgggaggctgaggcaggaattgcttgaacccgggaggtggaggttgcagtgagccaagatcgtgccactgcactccagggtgacagggagaccctgttttaaaaaaaaaaaaaatcccaaataaactagatgatgcctcatcccattctaagtccttcagattagggctacagctggcctggcagaaaggtgagggagaaagtcacaattaacatttgattggaatttacagagcaccagattgaattattatttttttttctcgagatggagtctttctctggcacctaggctggagtgcaatggtgtgatctccgctcactgcaacctccacctcctgggttcaagtgattctcctgcctcagcctcctgtgtagctgggattacagacacccaccaccacgccaggctaatttttgtattcttaatagagatggccatgttggccaggctggtctcaaactcctgacctcatgatctgtccgccttggactcccaaagtgctgggattacaggcatgagccactgtgcccggcctgaattattatttttgagacagagtcttgctctatcacccaggctggagggcagtggcatgatctcagctcactgtaatctcgcctcccaggttcaagtcattctcctgcctcaacctcccgagtagctgggattacaggcatgcgccaccacactgggttaatttttgtatttttgtagaatggtgtttcaccgttttggccaggctggtctcgaactcctgacctcaggtgatccacccgcctcggcctcccaaagtgctgggattgcaggcattaagctaccgtgcccagcctcttttgtaatttttaaattttaattttttttttttttgagacagagtttcactcttgttgcccaggctggagtgcaatggcatgatctcggctcactgaaacctctacttcccaggtacaagcgattctcctgtctcagcctcccaagtagctcggattacaggcatgtgccaccaggcccggctattttttttgtatttagtagagacagggtttcaccgtgttaggctggtcttgaactcctgacctcaggtgatccacccacctcggcttcccaaagtgctgggattacaggcatgcgccatcgcgcctggccttaagtttttaaaattttaagtcgggtagcacccccaaatcagaataagttcagagagacttcctgtcttttctttccacctctcttcttgctacctgaatcttttgtagtgaagcaggatagttcataaatagaaaaatgaaggatgagaaggcgcttccactgtccaaacgtgaccactgccaccccgtcactccccgatgctcaccacagtttctggagtctgcaggcgggatgttgcagcccctcagccagcaaccacaggccccagtctcccaggtcgttgaaactcaagtccagctcccggaggttgtggttggcctggagcaccacagaaagaccctcacaggcggcagagcccagccggcagatgcccaacctgcaaagacaggatgctagggcggagtgggaggcattcctcctgcaaaatctgctgggagggccctgtgccaagccctgtgctggttgcagacagagggacagactcaatctctacccttgagagacaaaaagaaaaagacgacagaagtaggaagatgagaggaagggaggaataagagaacagaaggaagcaactaagaatcaggccaggtgccctggctcatgcctgtcatcccagcatcttgggaggcttgaggctggagggttttttgaggtcaggagtttgtgaccagtctggacaaccaataacttgtctgtacaaaaaaaaattttttttctttttgcgatggcgtttccctcttgttgtccaggctggagtgcaatggtgcaatctcggctcactgcaacctccacctcacaagctcaagcgattctcctgcctcagtctcccaagtagatgggattacaggcatgtggcaacatgcccggctaatttttgtatttttagtacaagcggggtttcaccatgttggtcaggctggtttcgaactcctgaccttaggtgatccacccgcctcagcctcctatctacaaattttttttttttttttttttgagacagagtcttgcaatgtcgcccaggctggagtgcagtggcgtgatcttggctcactgcaacctccgcctcctgggttcaagtgattcttctgcctcagcctcctgagtagctgtgactacaggtgcacaccaccacgcccagctaatttttgtatttttagtagagacggggtttcaccagttggccaggatggtctccatctcttgacctcgtgatccacccgcctcagcctcccaaagtgctgggtttacaggcatgagccaccgcgcccagccgcgtgtgtgattttttgttttttgttttttgctggtgccttgataaaaaaaatacacaaagtgtgttttttgagcacttctacccacgtcttatactagtcactaggagatacagttggcatagctcctatgcttgtggaatgccaccacacacacatatacacaaattacaaatttttcttttttttttttgagatggaatctcgctctgtcatccaggctggagtgcagtggcaaaatctcagctcactgcaacctccggctcccgggttcaagcaattcttctgcctcagcctcctgagtacctggatatcaggcgtccgccaccatgcctggctaatttttatatttttagtagagacggggtttcaccatgttggccaggctagtcttgaactcctgacctcaggtcattctcccaccttggcctcccaaagtgctaagattacaggtgtgagccaccgcatcctgccttcagatttcaataaatgatgctgagggggaagtatgaggtcacataggatcataaatctaggaacccagattttagctagggattagaaagggtgtccagctgggtgtagtgggtcacacctgtaatcccagcactttggaaggccaaggccagaggatctcctaaggccaggagtttgacaccagcctaggcaacaaatcgagaccttgtccctacaaaaaataaataaaaattggccaggcgcagtggctcacgcctgtaatcccagcactttgggaggccgaggcaggtggatcatgaggtcaggagagagagaccatcctggctaacacggtgaaaccccatctctactaaaaaaatgtttttaaaaattagccgggcatggtggcgggcacctttagtcccagctactcgggaggctgaggcaggagaatggtgtgaacccgggaggtggagctcgcagtaagctgagatcgcgccaccgcactccagcctgggcgacagggcaagactcgtctcaaaaaaaaagtaaaaattagccatctgtggtggcatgcgcttgcagtcccagctactcaggaggctgagttgggaggatggcttcagcccaggatgtcgggctatgatcacaccactccactccagcactggtgacagagcaagaccctgtctcaaaatacaaagtaaagagtgttcagaagaaaaattgaacttctccaggcaaagaggggacagagagcagaaggcatgccagggaataagaattgcttgtgcaaagggccgtgcgtcagaaaaccccccccttttttttttttgagacggagtttcgctcttgttgcccagactggagtgcaatggctccatctcagctcacagcaacttccacctcccgggttcaacggattctcctgcctcagcctcgcgagtagctggcattataggcatgcaccaccatgcctggctacttttgtatttttagtacagatggggtgtttctacatgttggtcaggctggtctcgaattccccacctcaggtgatcctcccacctcggcctcccaaaagtgctggaattaaggtgtcagccaccatgcccggccagaaaaatccttttaaaaaggctgatgtaggctgggtgcagtggctcaagcctgtaatcccagcactttgggaggccaaggcaggcagatcatgaggtcagtagatcgagaccatcctgctaacatgatgaaaccctgtctctactaaaaatacaaaaaattagctgggcttggtggcgggcgcctgtaatctcagctacttgggagtctcaaaaaaaaaaaaaaaaggctgatgtagtagctagagtttaggagcagagacaacctggcctccgtggtcccaggtgagagggctgcgttcatggattgggactcctagcgtggtgagcaaaacgggactcaccgcagggtctggagcttgcacgtgggatgcctgaggccctcacacagcagcagcaccccgaggtcccccagctcattcaggctcaggtccagctctctcaggctctggttcacactgagagttgaggccagctcgtcacaggcagcagcagtgaggcggcagatcttcagcctgcacaaagtccaattcaacaagcattatggaggctttcctttctttttctttttttttttttttttttttgagacagagtcccactctgttgcccaggctggaatgcagtggtgcaatctcggctcagctgcatcctccacctcccatgttcaagcgattctcctgcctcagcctcctgaatcgctgggactacaagcgtgtggcatcacgcctagttagtttttgtatttttagtagagacagggtttctcgccatgttggctagggtggtctcgaactcctgaccatgggtgatatgcctgcctcagcctcccaaaggactggaattacaggcgtgagccactgcgcctaggcccccaatcttaacagtaatgcattttcagacaatctaatttaaaaatgggcaaaagggcccggcctggtggctcacgcctgtaatcccagcactttgggaggccgaggctggcagatcacctgaggtcgggagtttgagaccagcctgaccaacatggagaaaccccctctctactaataatacaaaattagactgggcacagtggctcatgcctgtaatctcagcactttgggaggctgagatgggtggatcacctgaggttgggagatggagaccatcctggctaacatggtgaaaccccgtctctactaaatacaaaaaattagctgggcgtggtggcgcatgcctgtaatcccagctacttgggaggctgaggcaggagaatcacttgaacccaggaggcggaggttgccgtgagctgagatcacgccattgcactccagcctgggcaacaagagtggaactccatctcaaataaataaataataaataaaaataaatgagcaaaaggcttgaatacacatttcttcaaggaaggtgtacaaatggccaaaaagcacctgaaaagatgctcaatctcaataatcattggggaaatacaaatgaaaaccacgataagatagcatctcatacccattaggatgcctactattaaaaataaatagaatgcggccgggcatggtggctcacgcctgtaatcccagcactttcgggggctgaggcgggcgggtcacgaggtcaggagatcgagaccatcctggctaacacggtgaaaccccgtctctactaaaaatacaaaaaattagccaagcgtggtggcaggcgcctgtagtcccagctactagggaggtcgaggcaggagaatggtgtgaacccgggaggcggagcttgcagtgagcagagatcacaccactgcactccagcctgggcgacagagcaagactctgtctcaaaaaaaaaaaagaaaactggggaagatggtacattttatgttgcatgtattttaccacaattaaatttactttttattttattagggacagggtctcaccctgtcacccagtctggggtacagtggcttgatcacagctcactgcagccttggcctccgaggctcctgaatagctgggactccagacacataccacccaccccagctaattatgtttattttttgtagagatgaagtctcactggttcccaggctgctcttgagctcctgcactcaagccattctcctgccttggccttccagagggttgtgattacagctgtgagccaccgcgccctgcccttctgaatatttttgatccatggttgatgaaattcacgaatgcagaacccgtggacacagagggctgactgtggctcagtggcatgaagtagtttcacgctactgggaaatcatcactgctatccatctctggaactttttttttttttgagacggagtttcgtttttgttgtccaggctggagtgcaatgacacagtgttggctcaccacaacctccgcctcccaagttcaagtgattctcctgcctcagcctcccgagtagttgggattataggcatgtgccaccacgcctggctaattttgtattttagtagagacggggcttctccatgttggtcaggctggtctcgaactccagacctcaggtgatctgcccacctcggcctcccaaagtgctgggattacaggcgtgaactaccgcacccggcccatctctggaactttttcatcttccgaaatggaacctctgctcccgttaaacggtaactccccatttcttcctgttctaggccttggcagccactattctactttgttttttgagatggagtctcactctgtcaccgtggctggagtgcagtgacgtgatctcagctcactgcaacttccgcctctcaggttcaagtgatcctcctgcctcagccccctgagtagctgtgattacaggcgtgtgccaccacatccagctaatttttgtatctttagtagagagggggtttcaccgtgttggccaggctggtctcgaactcctgacctcagatgatctgccctctttggcctcccaaagtgccgggattacaggcgtgagccactgcgcccgacctgtggatgcatttttataccatcattcaatatgaagagatttgccattttattatagttgaccccaggaagaactcaccacaaagtccgtagtctgcagactgggtgcctcagtccctggcatagtaacctcaggcccaaatcctccagtgcatttcctgtcaggtccaactcaaccagatgtgggttggtgccgagcacagaagccatctcctgacaagccccggactccagctgacacttcctcaaccttgggaggaaggagaggttgaaggggacgccatcttgcttttctatgtcgtgatcactcatgctccagcctgttattttattatttaggaacaggttgttgctctgtcacccagggtgaagttcagtggagtgatatcaactcgctgaagcctcgacctccaggctcccgtgatcctcctgcctcagcctcctgagtaactgggaatacatgtgtgcaccaccacacctgcctaattttttttgtttgtttgttttttgttttttttgggtttttttgtttttttttttttttgaggtagaacctcattctgtcacccaggctggagtacagtggcgtgatcttgcctcaccgcaacctccacctcctgggttcaagtgattttcatacctcagtctcgagtagctgggactacaggctgggctacaggtgtgtgccaccacgcccagctaagttttgcatttttagtagagacggggtgtttctccgtgttggccaggctggtctcgaactcctgacctcaggtgatccgcctgccttggcctcccaaagtgctgggattatagacgtgaaccaccgctcctggcccatacctggctaattaaaaaaaaaaaatttttgtaggtcgagtgcagtggctcacacctgtaattccagcactttgggaggccaaggtgggtggatcatttgaggtcaggagttcaagaccagcctggccaacgtgaggaaaccccatctctactaaaaatacaaaaaagttagctgggtgtggtggtgggtgcctgtaatcccagctacttgggagcctgaggcaggagaatcacttgaacgcaggaagtgggggttgcagtgagccgagattgtgccactgcaccccaacttgggcaacatagcaagaccccgtctcgggagaaaaaaagaagaggtgggggatggccccagggactcttcatcatgtagaattgagtgtggagtcagaggagggcagaagcaggtcttccaaagtgcctagagtccagggccagggtcttaggtcatggggttaagggccagccctgatttaaaggtggagatttggggattaccagcattttgtgatatttcatgccccaggagacaatgagcttaagaagttgctcccggggatagagactcactgaatcatctgcagcctgcactggggatgccgcaggccctcgcaaagcagcatcatgcctgggaatccaacgccgttgccactgagatccatccttgtcaaattcttattggctatgagagctgcagagaggtcctcgcaggctgagctggagatgcggcacctcttcagcctggggtggaaaagaggagaaaggagctggtcatttcttttgctccagttttgtggattattttcttttgcttttttttttttttctgagacagagtcgctctgtcacccaggctggagagcagtggcatgattttggcttaccacaacctctgcctcctgggttgaagcaatcctcctgccttggcctcctgagtagctgggcttacagacgtgtgccaccatgcctggctcattttggtatttttagtagagatggggtttcaccatgttggccaggctggtcttgaactcctgggtcaagtgatcctccccatctgggcctcccaaagtgctggaattacaggcgtgagccatcatacctggccaatatatttatttcaaaatatcatgttatatatgataaattttacctgtcaagaaaagcaacaagaacaatataaaatgttttgatgctttgtagtcaaatacattcacaaaggttgcccttaaagaaattcaaggccatgtgcggtggctcaagcctgtaatctcagcactttgggaggccgaggtgggtggatcacctgaggtcaggagtttatgaccagcctggccaacacagtgaaaccccatttctactataaacacaaaaattagctgggtgtggtgatgcacccctgtaatcccagctaatcaggaggctgaggcaggagaattgcttgaactcaggaggcggaggttgcagtgagtcgagatcatgtcactgcactccagcccaggctacagagcaatactatctcaaaaaataacatatgaaaaaaatttggctaggcacagtggctcacacctgtaatctcaacagttagggaggctgaggaaggaggatcacttgaggccagaagtttgagaccagtatgggcagcatggtgaaaccccatctctccaaaacatacaaaaattagcctggtgtggctgggcacggtggctcagtctgtaatcccagcactttgggaggccgaggtgggtggatcacgaggttagagattgagaccatcctggctaatatggtgaaaccccgtctctactaaaaatacaaaaaattagctgggcatggtggcacctgcctgtagtcccagctactcaggaggccgaggcaggagaatcgcttgaacccaggaggcagaggttgcagtgagccgagatcacgctactgcactccagcctggtgacaaagcaagactccgtctcaaaaaaaaaaaaaaaaaaaaaaaaagaaattagccgggtgtggttgcacatgcttgttttcccagctactcgtgatgctggagcaagaggatcgcttgagtccaggagtttggggctgcagtgagccatgattgtgccactgcactccagcctgggtgacagagcatatcagtgtctcaaaaatttaaaaaaaaaaaaagtaaaaaaaagaaaaaaatttggagacccacacagcaggatgaccatgtgaagacagaaggcagtgatctgcaggcccaggacagaggcctcagaagaacttaacctgcccactccttgtcttggacttccagcagccccccacctgccttgagaaaatagatttatgtggtgaagccacccagtctttggcacttttttcccccctgagatggagtctcaccgtatcacccaggctggagtgcagtggcacaatcccggctcactgcaacctccgcctcccaggttcaagcgattctcctgcctcagcctcccaagcagctgggattacaggcgcccgccaccacaccctcctgatttttgtattttttgtagagatggcattttgccatgttggccaggctggtctcaaactcctgacctcaagtgatctgcccgccttcacctgtcaacatactgggattacagacgtgagccacggcacctggctttgtgacacttttttatggcagccgtagccaacgaatacaccatcccgtgatagaacctttgtgactgatccccatgagaggccacggtggggaccacctgaaacgcccagaccagcctgcactcacctcaggttctgaagtttgcagttggggtgtctgagtccttgacagagcagcttcaccccccggctgcccagggcatttcggtacagagacagctctatcaggtttggattggtgcacagggccgctgccagatgttcactgtaggcgtccagcagaacggtcctctctggtctgcttgaaggaaagacaggccactctctggtgttactggtgcttgacaactatggcctttgcatgtcatttcaccgtttatgaagcatgctatccttttttgagacggagtttcgctcttgttgcccaggctggagtgcaatggcgcaatctcagctcaccacaacctccgcctcctgggttcaagcgattctcctgcctcagcctccagagtagctgggattacaggcatgagccaccacgcccagttaattttgtatttttagtagagatggggtttcaccgtgttggccaggctgatctcgtactcctgacctcaggtgatctgcccgcctcaacctcctgaagtgctgggattacaggcgtgagccaccacatccggccaaagcatgctatcttttcatttttttttttagagggccttgccctgttgtctaggctggagtgcatggtgagatcatggctcactgtaggcttgacctcccaggcttaagcaatcctcccacctcagcctactgagaagctggggctacaggtgtgcaccatcatgaccagctaatttattttatatttttagagatggggatctcatcatgttgtccaggctgcacctggctctatctgacgctcctaatcattgatagttggtttacttgtttccctctttattatctgtctccgttctcattaggatgcgtgctctcttgggaccattggcttattcacacagtcttctgtctacagaagattgttgggtccaccgataaaagggatatagaggctgggtgtggtggctcacacctataatcccagcactttgggaggctgaggccgagagtttgagaccagcctggccaacatggtgacaccccatctctactaaaaaaatacaaaaattagctgggtgtggtggcacactcctgtggtcccagctgctcaggaggctgagacacgcaaggtggaggttgcagtgagctgagattgtgcccctgcactccagccttggtgacagagccacactctctcaagaaaaagggacttagtaatatttgttgattgaataaattctcccagacatcgacctcaatttagtcccaatgggtgttgtttagtctttgtggcactattgacactttggggccagagggactgtcctgtgtactgtaggatgtttgcagcattcccggcctttatccactagatgtcagtagtattatttgcttcccagttgtgaccaccaaaaacgtgtctccaaacatcgccaaatgtcagagcaaaatcacccccagctgagaggcactggttaagagcatgaacctcaaggccaaggtgggtggatcacttgaggtcaggagttcaagaccagcctggctaacacagcgaaaccccatctccactaaaaatacaaaaattatcctggcatggtgatgggcacctgtaatcccagctactcaggaggctgaggcaggagaatcgcttgaacccgggaggcagaggctgcagtgagccaagattgcgccactgcacaccagcctaggagaccaagagagacttagtttaaaaaaaaaaaaaaaaaaaaatcgtgggccgggtgcagtggctcatgcctgtaatcccagcactttgggaggccaaggcgggcagatcacgaggtcaagagatcgagaccaccctggccaacatggtgaaaccctgtctctactaaaaatacaaaaattaggtgggcgtggtggcgtgcacctgtagtcccagctacttgggaggctgaagcaggagaatctcttgaacccgggaggcggaggttgcagtgagctgaggtcacgccagtgtactccagcctaggcaacagagcaaaaaaaaaaaaaaaaaaaaaaaacacacgaacctaagcagccccaggggataccccagggatacttacagctgcaccaacagcgtgtgcgctcctgcggagcacctcgcgcggtcttccccgtccgcgctgtaggtggcgccatacaagtgcagcacctgggcgctcctgcagcgcttcagacagaacgaggagaccatgtgctccatcttggaggcaatgttgctgaccacgatcacctggaagtggctcagggcctgctggataaactcctcctcctggatctcgtacaagcagctgaagaactccaaggagccctgctgcagggtggagccgtcgctctgagctttgctttggatccactgcaacaggtccatcttgatgtgcggcgagaccttccagcagagactcttctccaggtggctcctggtctcctcgttcaggagtccaaacaggaagcggctggtgagtgccaggaagctcctttcagaaaacgcgtactcggtcaacagcctggtcacgtcctggtctgggcctgccccgccctccccctcgtccaggatatagtacatagctgcaaagaattcctggaaactcaagtggatgaagctgtagtacctctcacagttgatgtccttctggaagatgttcatgttgaggaaggcagagacgtcttccccgtctaggccgtgcttccggaggtcctgctcctcaaataggattttctgattccagagcccatctgccgccaaggagcacaaccctctctggttgggtgggggctggaggcgcggggcccccggcttgggttgcatcagactcagcaggtagagcatgtacactgcagtggtggtcctggacgtctgtctcaacagccccccaccctccagctgctgctggaggcaggtacacaccacccagcacaccagggggacgaagcacatggtgaagagaggctcgttgtccctcacgtaattgaagacttggcccgcctgctctgcattgtggaaatacttgtagaagtattccttcctttctgcctcagagaagcccaggatctccacatgcctggggtgctccagcagacggtggagcttctccaaagccgtgggccgtgtggtgatgagcaaagatagctcagggagcagcttcttccgaattaagctgttaagaagcagctccgtgggccgtttctcctcccagcagaggcaccagggtccctgaggatcgtggaaagaaggcttgagctcatcgaagccgtcgatgatgaaaaggaggcgctcgggaactcggatgagctcctggagaggcgcgctgggctcaggccagcagctgaagatgaggtcttgcatgctgcattccgtggcactctggttcatctccctgcagttgatgtagaagagataatcaaatctgccttggaagagcttcccgtccgcccagtccagcatcaccttgtgtgccagcatggacttgcctatccctgccgcgccttgcatgaccacggtgcgcggtggctcggggcgctcctcgtctggctcaaagagggtctctatcttgatggggctagcctggtgtcccacggtcctcgcgtgtccccggcctgtgtccagaagctgctgctggacctgcatggggtttgagtgctccttcaccagcaggagccgggtgtaccggtggctgaggttgacacattcccctaggcgcgcattgcggtcttccatgagccggaatttcctgcggacatagtccctgtaggtttcctggggatctaggggagaggaatgaaggttttgtggaagactcatcagcagcctctaatgagttcacgaggtaaagcgctcctcatgtggctcaaagaaggtgtgtgcctgtagttccagctactcaggaggctgagatgggagaatcacttgaacccctgaggtggaggttgcagtgagctgagatcgcaccactgcactctagcctgggcaacagagccagactccatctcaaaaaaaaattttttttaattaaaataatttatttgttttgagactaggttataagactggctaattttttttttttttagatggagtctcgctctgttgcccagcttggagtgcaatggtgtgctccctgcaacatccacctcctgggttcaagtgattctccagtctcagcctcccgagtagctgggattacaggcacatgccaccaggcctggctaatttttgtatttttagtagagacggggtttcactatgttggccaggatggtctcgatctcttgacctcatgatctgcccacctcggccttccaaagtgctaggattagaggcatgagccactgtgtccagccccacaaagtgactttcagcaaaggatttatagaacgggtacattaccagatagtgcagacatgaatctgccttttttcaaagggggcacaagccaggtgcggtggctcacgcctgtaatcccagcactttgggaggtccaggtgggaggatcgcctgaactcaggagtttgagaccagccggagcaacatagtgagaccctgtctctataaaaacaaaagaaagagaaaacaaagggggcacagaaaacttgggagcagtgcttctcaaactttttttttttttcagtacagacagggtcttgctgtgttatccaggctggtctacaactactagcctcaaacaatcctcctgcctgagccccgcaaaatgctgagattacaggcatgaaccaccatgcctggctgtgcttctccaactttaagacgcatacatatcatgcagcaatcttgttagaaatgcagtccctgggctaagtgcagtggctcacacctgtaagagatcgccccactgcactccagcctgggcgacagcgtgagactctgcctcaaaaaaaaaaaaaaaaaatctagaacaatgttcttaattggggtgactgtgtcccctagttccccaggggacatttggcaacgggacaagtgggttggttgttacaactgggaaagtactactgccacatagtggatagaggccagaggtgctgctcaacatcccaggaaccacaggacgaccccatagcaaagaacgctctggccccgaaatgccaacagtgccaatgtggagaaaccctggtctggatacaaatgcatcccttggtattggatgccagcagaggcccatgatagctgcctgagagaagcttaaaaaaaagaatctgagtttgatactaaaattttcaaaacaaatatgtgtacttttaattatagtgacatacacataaaatttaccattttaaccactttaaagcgtacaactctgtgacactaagttcacgatgttgtgcaatcatcaatatctctttttttttttttttttgagacagagtgttgctctgtcccccaggctggagtgcagtggcatgatctaggctcactgcaaactccgcctcccaggctcaagtgattctcctgcctcagtctcctgagtaactcgatttacaggtgctcgccaccacacccagctgatttttgtatttttagtagagacggagtttcaccatgttggccaggctggtttcgaactcctgacctcaagtgatctgcccgcctcggcctctcaaagtgctggaattacagacgtgagccactgtgcctggccgccaatgtctatttccagaatgctttcagcattctaaacagaaactccatatccattaaatattaactcataatttctcctctccctggcaactgctattcttttttttttttcttttctttttttttttttttttttttgagacagagtcttgctctgtcacctgggctggagtgcggcggcacgattcggcttactgcaagctccgcctcccaggctcacaccattctcctgcctcagcctcccaagtagctcagactacaggtgcctgccaccacgcctggctaatttttttgtatttttagtagagacaaggtttcaccgtgttagccaggatggtctcgatctcctgacctcatgatctgcccgcctgagcctcctaaagtgctgggattacaggcgtgagccaccatgccgggcgtggcaactgctgttctactttccgcctctgaatttgactactctaggtgccttagataagtggaatcatacaatatttgtacccctctcccgcctttttttttgagacagggtctttctcactccccccaggctggagtgcagtggcgtgaccttggctcactgcaacttcaacctcctgggctcaactaatcctcccacctcagcctcctgagtagctggatctacaggcacaagtttccatgcccagctaatgttcgattttttgtttttttttgtagagatggggtcttgcttgttgcccaggctggtctcagagcctggcctcccaaagtgcagggattacaggcgtgagccaccttgctcagctggtgaacccactcttattctactttagtagagctggagactagattcatttcatgctccccttgaaaaaaatagccagaaacatttgtggcattgttaacagtgttgctgtctacccagcagactgtaccccggtttcttccctgccagcaaacctgattctgtttggttggtggatgctgattcatgactcgagtgagtggtgaatcctgccccttcacaagcctcagaggatgaattatggttttgctaaatcagtcatgagtaacctcgttcccctctgtcagtggttgctctgagaatgggcagattccccagtactgaccagtgggttacgtggatgtgactggtaacagggaggaagaaggcctttacccttcctttctttgctttttttttaagagatggagtctcactctgttgcccaggctggagtgcagtggtgcaatcttggctcactgcaacctctacctcccaggttcaagtgattcttctgcctcagcctctgagtagctgggactacaggtatgctccaccacaccctgctaattttgtatttttagtagagacggggttttgccatgttgtccgggctggtcttgaactcctgacctcaggtgatctgcccgctttggcctcccaaagtgctgggattacaggcgtgagccactgtacctggcctcttagccttccttgttgcccctgcgtgtatgagatggtttggtagccatctttcagccaggagatgacacgtgtcaggacaaaatgctgacgtggaaaggttgatgagttgaaacacaggaggaaactgcccctttgatggtgtcattaatccaccccacgaattcctcaatcacgcgtttgtggttggcctacactccgtggggtcagctgctctgtgtagatgaatacatgtaggtacatggcttgaggctcaccttttcttggagtgacaagagagacttccagaaggcatgttgactggttcccaagtgaggacgggccaccaggtggggtatctggaagagaaattgtggaagatgagctagcacgcatctggctagtagcaccgcgtcatattagctgcgattacgtcgaaatgcctgcataactccctggtcacccgcaccccagaatgttcagtagtgactgcataggccgtgtgtgggaaatagctcatcccttgttccttgtagcgcaccctcctccctgggtccccctcatggtcattggcacctccatccatccaatcagtctttttttttttttttttttttgagacggagtcttgctctgttgcccaggctggaatgcagtggcatgatctcggctcaccacaacctccacctcctgaattcaagcgattctcctgcctcagcctcacgagtagctggcattacaggtgtgcgccacaatgcctggctaatttttgtatttttagtagagacggggtttcactatgttggccaggctggtcttgaactcctgaccttgtgatccacctgccttggcctcccaaagtgctgggtttacagatgtgagccactgcacctggcaccaaccaatctttttgactgggaagttctgagtcagtctggactcctcccttgtcagctctgggccacatctcatccattatcttttcttttttcttttcgagacggagtctggctctgttgcccaggctggagtgcagtggcacaatcttggctcactgcaacctctgcctcccgggttcaagtgattctcctgcctcagcctcctgagtagctgggactacaggcatgtgtcaccacgcccggataatttattttgtatttttagtagagacagggtttcaccatgtgggtcaggctggtcttgaactcctgacctcgtgatccacccaactcggcctcccaaagtgctgggattacaggcgtgagccactgcgcctggcgactctgtctcttaaaaatattttaatttttttttttttttttggtagagattaggtctcagtatgttacccaggctggtctggaactcctagcttcaagcagtctttcgaccttggcctcttgaagtgttggaaatagtggtatgggccatcgtgcccagcccaaaaaaggccttcgtttggatatatcataagattctacacatcgagtccttccttggcatctttggtcctcagaaggccccccaaagtcctaagtgtgagttcctttgctctcactccatgagaaagtcttcccacctggctagttctcccatcagctgagccagcggcaccccatctggtcctcactctgataagttttcacctccctgctggttgctagtccatgaaatgattcatgaaagcaaagaacatccttttgaaggagccaggaggcaccccaccctcttgttactacacagcccgccccccccaacagtctctgtagcttcatgtgaccctcttggcatatggggacaccttccctgtgagtctgtgtgactaataaactgttgtctttcctctgttcagtgctggctctggtagattcagtcatctggcaccattttatttatttatttttatttatttgagacagtctcgctctgtcgcccaggctggagtgcagtggcgcgatctcggctcactacaatcttcacctcccaggtttaagtgattctcctgcctcagtctcccgagtagctgggactacaggcacccatgaccacgcaggtggtggtaaaaatacaaaaaaataatttttgtatttttagtagagatgcggtttgaccatgttggccaggctggtcttgaactcctgacctcaggtgatctgcctgcctcggcctcccaaagtgctgggattacaggcgtgagctactgcacccggccactcaaaaatttttaattggagaaggttatcattgagaggaaaggggaaaatagggaattgtttaatgggtatcgagtttgttttgcaagatgaagagttctgcagattgaatgcacatcagtgtaaatgtacaacactcagcagcacacttaaaaatggttaagagggccagggcgcggtggctcacgcctgtaatcccagcactttgggaggccaaggcgggtggatcacaaggtcaggagatcgagaccatcctgggtaacacggtgaaaccccgtctctactaaaaatacaaaaaaaaattagctgggcatggtggcaggcacctgtagtcccagcaatttgggaggccgaggcaggtgggattacctgatgtcaggagttcaagactagccttaccaacgtggtgaaaccttgtctctattaaaaatacaaaaatgagccaggcatggtggcgcgtgcctgtaatcccagctactcgggaggctgaggcaggagaatcgcttgaaccagggagtcagaggttgaagtgtgctgacatcgcatcattgcactccagcctggtgacggagcgagactccatctcaagaaagaaaaagtggttaagaggaggctgggcgcggtggctcatgcctgtaatccctgcactttgggaggccaaggtgggtggattacctgaggtcaggagttcaagaccagtctgaccaacatggagaaaccccatctctactaaaaatacaaaaattagctgggcgtggtggcagatgcctgtaatcccagctacttgggaggctgaggcaggataattgcttgaacccatgaggcagaggttgcagtgagccgagatcgcgccactgcactccagcctaggcaacaagagtgaaattccatctcaaagaaaaaaagaaaaagagggcaaatttcatgttttgtgtattttagcactatttatttatttatttatttatgagacagagtctcactgtgtcgtccaggctggtgtgatgttggctcactgcaacctctgcctccagggttcaagtgattctcctgcctcagcctccggagtagctgggattacaggcatgtacaaccacgaccagctaatttttgtatttttagtagagacagggtttcaccatgttggccaggctgttgtcaaattcctagtctcaagtgattcacgtgcctcagcctccaacatgctgggattacaggcatgagccactgcagctggttggcaatttttttttttttttgagagagggtcttgctctgttgctcaggctggagtagtgtggcatgatcttggctcactgcagccttcacctcctgggcttaagtgatcctcccatctcagcctcccaggtagctgggtctgcaggcatgcaccactgtgcctggtcaattttgtagagaaggggttttgccatgttgcctagaccagtctcaaacttctgggctcaagtgatctgcctgcctcagcctcccaaagtgctgggattataggtgtggccacattttttttttttaaaggtaatccaggccagcgcggtggctcacgcctgtaatcccaacattttgggaggctgaggtgggtggatcatgaggtcaggagattgagaccatcctggctaatatggtgaaaccccatctctactataaatacgaaattagccgggcgtggtggcgggtgcctgtagtcccaggtactcgggaggctgaggcaggagaatcgcttgaacccgggaggcggaggttgcagtgagccgagaacgcaccactgcactccggcctgggtgacagagtgagactccgtctcaaaaaaataaataaataaaaataaaaaaggtaattcttgaaaattgcagctgaaaaaggcctcagagatgttctccctcagtgtttcctaggcatgccgcgagaaccagccacatcaaaatgcagattcctgttgcctaagacctgctgattcagaatcacgggttgagggtcttggattccccattggccacaagtgtctcgagagactcttacgcacagtaacatgagaactgccgatcttgcctgatgcccttgttttacagatggagatggaggcccaggggcatatcgattctccagcatcacacagacagaaagagcaaagctagacatctgtctccttgggaacgctgagctgcctctcagtagactaaacggatgcagtccggggaagaacgctcggcaaatggttatgcattgtcaatgctgggagagatttaggcggaagagggagaaaagtgggactttacttttgattctatatttgtacattatttccatttcttaaaataactatgtaacacttccatttagatataattatacaatatgacaagtaagtaaattgatacttttttctttcttttctttttttgagatggagtctcgcttttgtcatccaggctggagtgcagtggcgtgatctcggctcactgcaacctccgcctcccgggttcaagtgattctcctgcctcagcctcccaagtagctgggattacaggcgtgtgccactacgcctggctaatatatatatatatatatatatatatatatatatatatatatatatatgtgtgtgtgtgtgtgtgtgtgtgtgtatatacatatgtgtatatatatgtatacatatgtgtatatatgtgtgtatgtatacgtatatatatgtatgtatacgtatatatatgcgtatatatgtatgtatacgtatatacgcatatatatgtatgtatacgtatatacgcgtatatatgtatgtatacgtatatatatacacatgtatacatatatgtatgtatacatatatatacacacacacacacgtatatatatatgtatgtatgtatattaagacggagttttgctcttcttgtccaggctggagtgcagtggcgggatcttggctcaccacaacctccgtctcctgggtggtggagaaaagggaaagagaaaaagagaggagagggagagaaaagaaaagaaaggaaggagggaaggaaagggaaaagaagggaaaagaaggaaggaaggagggaagaaaggctacaaacaagtgtctttggttttttcagtcattaaagactttgttttttacagagatgtttcccagcacactactactggcacacctcattaacgacgagtcattaagctttgcagaagtgactgtgtatatccagttattggcagggcttgcttactcattcagcaaatgttcaccaaagtttgctcggttcctagccccagccagacactggaatcgcagagaatcacacaggggagtcaagactctttctgcctttgaaggcgtccatgtcacagtagagaaaacaggtgagaaattacattaaaaaccacagctcaagcagggtgcagtggctcacgcctgtaattccagcattttgggaggccgaggtggatggatcacctgaggttaggagttcgagaccagcctgaccaacacggtgaaaccccgtctctactaaaaatacaaaaattagctgggtgtggtggcacgcacctgtagtcccagctactcaggaggctgaggcaggagaatcactggaacccgggaggcggagcttgcactgagccaagattgtgccactgcactccagcctgggcgacagagtgagactctgtctcagaaacaaaacaaaacaaaaaaccacagctcaaatggggctctgtggtgcacacctgtagttccagctgttcaagaggctgaggcaggcggatcacttcagcccaggagtttgagtctagcctgggcaacatagtgagaccctatctctaaaaaataaattattttttttttttttgagacggagtcttgcactgtcacccaggctggagtgcagtggcacaatctcagctcaccgcaagctctgcctcccaggttcacgccattctcctgcctcagcctcctgagtagctgggactacaggcgcccatcactgcgcccagctaattttttgtaaaaaataaaaatatttttaaaaaaacaattccacagctcaagtgccatctctgccacttcagcaatagcctatatttgctgagcacttgctacctgctctgaattgtgttaagcactttgcatgtattatctcttgagcttatgcctgagtataaatcatattttttcttttttttttttttttttttttgagacagagtcttactctgtcacccaggctggagtgcagtggcttaatcttcgctcactgcaacctccaccgcctgggttcaagtgattctcctgtctcagcctctagattagcagggattactggcgcccgccaccacacccggctaatttttttgtatttttagtagagacagggtttcaccatgttggccaggctggtctcgaactcctgacctcaggtgatccatccacctcaatctcccaaagtgctgggattacaggcgtgagccaccgcacccagctcattgtgattattttatgagatagaagatataataaaagaaatcatgttggctgggcacggtggctcacacctgtaatcacagcactttgggaggccgagacggctggatcatgaggtcaggagatcgagaccatcctggctaacatagggaaaccccgtctctattaaaaatacaaaaaattagccaggcatggtggcgggcacctgcagtcccagctactcgggaggctgaggcaggagaatggcgtgaacccaggaggtagagcttgcagtgagctgagattgcgccactgcactccagcctgggcgacagagcaagactctgtttcaacaacaacaacaaaaagaaatccaagagtgctaaggaggcacagaagtggggtttctgagccagccagagtggtgggagcgaggaatcagaaggagtgggggaagaggagtaaatactttactttagagaaggtagtggcttcaaggtttcagtaagtaatacttttccaggcaaagaagatggagaatattccaggcagaacacagcatgaacaaagaccaaagggatgaaattagaattctgtacacagtcataaaaaagaacaaaatcatgttctttgcagtaacatggacgcagctggaggccattatccaaagcaaactaatgcaggaatagaaaaccaaagactgcatgttctcacttataagtggaagctaaacattgggttctcatggacagaaagatgggaagaagagacactggggactcgtggcggggagaaatctcaccattgggtactattactatgttcaagtacctgcatgataggatcaatcttactctgaatctcagcatcactcaatatacccatgtaacaaacctgcacatgtaccccttgaatctaaaagttgaaatttttatatagatatagatgtgtgtgtacgtaaattagaattccagatctcccaggctcagggattagtatgaaagaaaagggaattggtggccaggcagtggtcattcatgcctgtaatcccagcactttgggaggctaaggtggaagctcgcttgagcccaggagttcaagaccagcccgggcaacataaggacacctcatcttggccgggcacagtggcttatgcccgtaatcccagcactttgggaggctgaggtgggtggatcacgaggtcagaagttcaagaccagcctggccaagatagtgaaaccccgtctctacaaaaaatacaaatacaaaaaattagccaggcatggtggcaggtacctgtaatctcagctactcgggatgctgaggcagaaaattgcttgaacctgggagacggaggttgcagtgagcggagattgcgccactgcactccagcctgggcaacagagcgagactcagtcttaaaaaaaaaaaaaaaaaaggatacctcatctctttcttaatttatttttgagatggggtttcactctgttacccagcctggagtacagtggtgcaatctcaactcactgcaatctccacctctcaggttcaagcgattctcctgcctcagcctcccatgtagctgggactataagcgtgtgccaccacgcctggctaatttttgtatttttagtagagacagggttttgctatgttggccagactgatctcgaattcctgacctcaggtgacccacccgccttggcctcccaaagtgctgggattataggtgtgagccactgcacctggctacctcatctcttaaaatatatatacacacacacatatacacacacatatatatacacatatatacacatatatatacgtgtgtgtatatatatataaattccagatctcccaggctcagggattttatatatatgtattttaaatatttattttaataatatatgtattaaatatttaatatataatatttattatttatatatatttatataatataccatatttatataatatagtatatttatataataaatatatactatatttatatataatatataccatatttaatatatatttaataatataattatatacatattttaaatatatatttaaaatatatgttttaaatatatatatttaaaatatatgttttaaatatatattttaaatatatatttaaaatatatattttaaaatatatttatttaaaatatatatttaaaacatatattttaaatatatatattttaaaaaaatatattttaaatatttgaggcaaggtctcgttctgtcacctaggctggggtgcagtggcaggatcatagctcaccgcagcctcgaccttctggtctcaagtgatcctcccacctcagcctcctgagaagctgggatcacagacgtataccaccacacctggctaattttttttatttttggtagagacagagcctcactatgttgtccagactggtcttgaactcctcacctcaagtgatctgccctcttcagcctcccaaagtgctgagattacaggtatgagtcactggacccggctggcattctagccttgcctgtcccgccacctccttacccctcaccaggtcctctctctgtcctctctcccacaggtccttcctgtttatccgctcaaaggtgctgagagccaacctccaggcctcctctggcccgaagtgggtgatgagcagctgggccatttccaggggaccggccttctccatgcttccccaggggatcttgccttctcccagctctgtcgcggtccccaggtataacttgaacttcttcagttccacagcctcgagttcttccaagtaggtggacaggcgacagaggccgtccctgcctgcggttcgtagcatgggggtgccgtgagccccaaaggagaggacctggaggctgagatgctcctatgcacgggacacagggcgaccccagcacaccttccattgcatcattcacaggcagcgggcggagaggctgagccagtggttggaggagagagcaagggaggaaagaccttttgctgaaataatgctttctcactcttcagttccctcctgccctgccccactcaccaatggctgttctgggtggagaagaggaagttcggggggagattaagaaatccgaggagccacttggctgatgaaaaagattttcacttctgctgtctcttcctggatctcttgacaaaacagtcactctctttccgctttcctcttgttttcctcatttcactagtgtgtgtggtagagtgtattatcaaaactgcgactgcgcctcttccagggagaatttttttttttttgagacagagtcttactctgtggccctggctctgcgatcttggctcaccgcaacctctgcctcccaggttcaagcgattctcccacctcagcttcccttgagtagctgggattacaggcgccggacaccacacccagctaatttttgtggttttagaagagacagggtttcaccatgttggtcaggctggtctcgaactcctgacctcaggtgatccacccgcctcagccttccaaagtgctaggattacaggtgtgagccaccgtccctggcttttttttttttttttttctttgagtcagagtctcactctgccacccaggctagagttcactggcgtgatctcagctcactgcaacctccgcctcccaggttccagcgattctcccacctcagcctctcaagtagctgggaccacagacatgcgccaccatgcccagctaagtttttgtagttttggtagagacaaggtcttcttatgttgcccaggctggccttgaactcctgagctcaaacgatccgcccacctcagccttccaaagtgctgggattacaggcatgagccactgagcccagcctcagggagaattattaaggacctcacgtaggtctgctattttttttctgttctctcagtcacaagagtggcatgagagggactttgcggtaggcaggatgatggtccccaaagatattcatgtcctaatggccagaacctgtgacatttcaccctacatagcaaaagagacttagcatatgtgaccaaatgaaggcacttcagatggggacattatcctggttatctgggcaggacccatggaatcacaagagtcttttttttgagacagagtcttgctctgttgcccaggctggagtgcagtggcacgaactcggatcactgcaagctccgcctcccaggttcacaccattctcctgcctcagccttccgtatagctgggactacaggtgcccgccaacacgcctggctaattctcttttttttgtatttttagtagagatggggtttcaccatgttagccaggatggtcttgatctcctgacttcgtgatccacctgcctcagcctcccaaagtgctgggattacaggcgtgagccaccgcacccagccacaagagtctttataagaagaagacaggagggttagtgtaagaggaagatgtgactgggtgcaatggctcatgcctgtaatcctagcacttggggaggccaaggcaggtagatcacctgaggccaggagtttcacaccagactggtcaacacagtgaggccccatctctacaaaatatgtgttagcagaatttatgaattctgatggaagagcaagtttataattccctctgtctcctgcatcatgccaactttgtttcatgctcctaatcaattaagacccctcagacacacacacacacacacacacacacacacacacacacacacacacacaaaagccttcatagccaggcgcagtggctcacacctgtaatcccagcactttgggagactgaggcgggcagatcacctgaggtcaggagtttgagaccagcctggccaacatggtgaaaccccgtctctactaaaaatacaaaaattagccgggcttggtggcacgcacctgtaatcccagctacttgggaggctgaggcaggagaatcacttgaacccgggaagcagaggttgcagtgagccgagactgcgccactgcactccagcctgggcaacagagcgagactctgtctcaaaaaaagaaaaaaaaaattagctggggtttggtggcgggtgcctgtagtcccagctactcaggaggctggggcaggaaaatcacttgaactcaggaggcggaggttgcaatgagccaagatcccgccattgcactccagcctgggtgacagagtaagactccgtctcaaaacaaaacaaaaaaaaccttcacagctttttatgagacattctcccacatccagtcccttccaggactaatattctgttgcatggcatgcagcagttttgagcaggggagggatggagtcaggtctgggttaaggaagattcctcaaggcccttgtggaaggcagaccaaacagaggaggcctggattgggagagcgagaagctgaagccttcatgtttcaggagatggagataatgcctgagtaagggcaggcggtgggtgcatcctgggagtgtggggatggcagtgatcattagaggggaggagaaaggtttggcaaacctgaactacctacagaccccatctgagcttcctcaagtggctcacgacgcaggctccttccacgccactgctgcaggtggtggtaaaactaatttctaggaattcggaagcgaggcttgggggaagctgaatccacatctgtctacttcatgcttccactttcaagatagaactttctcatggggaaagaagagaattggcaacttctatagctgcttctgggcttagtgccatttctggaaacacaagaatgaatctaaagacaaggaatgccattttcctttttttttctttttttttttttgtttttagtagatggggtttcaccatgttgcccaggatggccttcaactcctgagctcaagcgatcctcccacctcggcctcccaaagtgctgggattacaggcatgagacaccgcacccagcccaattttccttttttaaaaaatttttttgctgggtgcagtggctcacgcctgtaatcccagcattttgggaggctgaggcgggtggatcatttgaggtcaggagttcaagaccagcctggccaacatggtgaaaccccatctctactaaaaatacaaaaataacctgggtatggtggtgggcacctgtaatcccagctacttgggaggctgaggcagaagaatcacttgaacccaggagtggaggttgcagtgagccgagatcacatcactgcattccaggctgggtaacagagacaccatctcaaataaataaataaataaataaataaataatagaagttgtcaccaccacctgcttgccactcccttgaattctttcctgtgtgaagccaagaactatcccggggtaagccctgttttggggcctcacttgcctagcatcacaaggataaacccattcaaagcaggtgctaatttgccctgttggttttcaactagaagagaaattattatcatcagggacatttataaaaattatatatagaaggctgggtgtggtggctcacgcctgtagtcccagcactttcggaggccaaggtgggcagatcacttgaggtcaggagtttgagaccagcccggccaacatggcgaaaccccgtctctactaaaaatacaaaaattagccggatgtgctatcgcgcacctgtaattccagctactcggggggctgaggcacgagaatcacttgaaccttggaggtggaggttgcagtgagccgagatcacgccactgcactccagcctgggtgactgagtgagactctgtctcaacaacaacaacaaattaaaaataaaaaaataaataaaaatacaaaaattatccaggcatggtggcgtgtgcctgtaatcccagctactcgggaggctgtggcaggacaatctcctgaacctgggaggcggaggttgcagtaagccgagatcacaccactgcactccagcctgggccacagagtgagactccgtctcaaaaaaaaaaattatatatagatgaaatattttatatacattacaataagaattataaatatataaatatgtatatgaaattggtccctctctagacttcctgaatcaggatcttggtggggcaggggccatcaaacatatgtttctttttcctttttttcttatattaattttttgaatagagatgaggtctcactatgttgcccaagctggtctggaacacctgagctcaagtgatcctcccacctcagcctcccaaagtgctgggattacaagtgtgaaccaccacgcctggctaaatacatgtttttataatataaagctcccctagtgattctgctgagaaacatttctctgtgttagtactagaaaggcacagagaaatgcttgtttttctatcagcagaatttcccttttgccattccggaagagacctgtttcctttgagggaatactttgagaagtcacttgagtatgaaatctgttaactggagaaattttgcagtatggtgtttgcttgtttgcaggtaaaactaaatcattcaggataaaaaggcattttagaagccacgtggggaaaggcagaaggaaaggaaataggaggtgtcaggtgcctgggaagaacatttggagggtttatggagatgagtaataggaatttaaattgctttactatatggtgtacgatgaaaactgtcttctaccccaaccaaacccatcatcagtaaaacctatgctgctcgctagcacgttgtgaacatggatttgctgcgtttttttgttttgtttttttgctttttctgagacagtttcgctctttctgcccaggctggagtgcaatggcgccatcttggctcactgcaatctcctcttctcgggttcaagcgattctcgtgcctcagcctccaagtagctgggaccacaggcgcgtgccactacacccggctaatttttgtatttttagtagagacagggtttcactgtgttggtcaggctggtctcaaactcctgacctcaggtgatctacctgcctcggcctcccaaagtgctgggattacaggcgtgagccaccatgcctggcctgatttgcttttacaggcagtgtgacaaaatggtgtctctaactggcattgaatgactgtcccgtgggaggccacatctgaggtttctgtgcctctttgttgtcacatagagaggataccgagtgctacccactgttcccatgaccatcaccagcatcactagctcaccacgaactggctagaaaatggaaatcatcattctccacctatgaatggggaaactgaggctgagagggaagctctgagtgtgtggcctacacagcagtgctggaaaatgatggagacgactctgaaagccagttctggctccaaacttcaagcagctaaaatcctcatcagcttgtacaatgaggccaaccctccaatttgaaagagggatagactgaggtccaaagtagcaaagtcacctgcagaccatcatatagcactcaaaagttgcccaggggctgctaggatgcagtcttcttcttcctttttttttttttttctaatgagatggagtcttgctctgtcacaaggctggagtgcagtgatgttatctcagctcactgcaacctccacctcctgggttcaagcaattctcctgtctccgcatcccgggtagctgcgattacaggcacctgccaccactcccagctaatttttgtatttttagtagagacggatgatctcgatctcctgacctcgtgatccacccgcctcggccttccaaagtgctggggttacaggcgtgagccaccgcgcccagccacagtcactttcatcagggcctgagtgtaggggttgtgaaacttcctcccctgtgagctatgtcctcacttttaccacagaccctggcaggaaacatcctggctgtgactttccctgtgggttttaggaacagttgcacagggtccagccccaccacaggctccactacccttgccctgatcaatcgggaagattcagccacagctgatggtactaaaactttggtttttttttttttttgagatggaatctcactctgttgcccagactggagtgcagtggtgccttctcagctcactgcaacctccgcttcccaggtttaagtgattctcatgtctcagtctccgcagtagctgggattacaggcacccaccaccatgcccggctaagttttgtatttttagtagagatggggtttcaccatgttggccaggctggtctcgaactcctgacctcaagtgatctgcccgccttggcctcccaaagtcctgaaattacaggcatgagccacctcactcagccggatgatacttaaaacttagtatcagggagaagtaggtggcacttaaagaaaatgtattatgttccttccttctcagaccaataatctccctctgtattagctaagtttcctcagagaaacagaatcaatggaagggagacatccacacacagagagttagagagaaagggatttattatggggactggctcacaggcatgcagagccctaggagttgcaccatctgccagctgccagctgtagaagcaggaaagctggtgtggaattcactccaggaccaaaggcctgggaaccaggagctccgatgtcctagggcaagagaagatggactttccagtttaaaaaaagagggcaggctgggcgtggcagctcacgcctgtaatcccagcactttgggaggccgaggtgggcagattacctgaggtcaggagttcgagctccacctgaccaacatggagaaaccccatctctactaaaaatacaaaattagctgggtgtggtggcacatgcctgtaatcccagttactcgggaggctgaggcaggaggatcgcttggactcaggaggcggaggttgcggtgagccaagatagcaccatagtactccagcctgggcaaaaaaaagggcaggccgggcgcagtgtctcaaacctgtaatcctagcattttgggaggatgagccaggaggattgctcgagcccaggagtttgagaccagcctgggctgtcaggcctctgagcccaagccaagccatcgcatcccctgtgacctgcacgtatacgcccagatggcctgaagtaactaaagaatcacaaaagaagtgaatatgccctgccccaccttaactgatgacattccaccacaaaagaagtgtaaatggccggtccttgccttaactgatgacattaccttgtgaaagtccttttcctggctcatcctggctcaaaaagctcccccactgagcaccttgcgacccccactcctacccaccagagaacaaaccccctttgactgtaattttcctttacctacccaaatcctataaaacggccccacccttatctcccttcgctgactctcttttcggactcagcccacctgcacccacgtgaaataaacagctttattgctcacacaaagcctgtttggtggtctcttcacacggacgcgcgtgaaatttggtgccgtgactcggatcgggggacctcccttgggagatcaatcccctgtcctcctgctctttgctccgtgagaaacatccacttacgacctcaggtcctcagaccgaccagcccaagaaacatctcaccaatttcaaatctggtaagcggcctctttttactctcttctccaacctccctcactatccctcaacctctttctcctttcaatcttggcgccacacttcaatctctcccttctcttaatttcaattcctttcattttctggtagagacaaaagagacacgttttatccgtgaacccaaaactccggcgccggtcacggactgggaaggcagccttcccttggcgtttaatcattacagggacgcctctctgattatacactcacatttcaagggtgtcagaccacgcagggacgcctgccttggtccttcaccctcagcggcaagtcccgctttcctagggggcaagaaccccccaatcgcttatttccgcaccccaacctcttatctctgcgccccaatcccttatttccacaccctgacctcttatctgtgtgccccaatcccttatttccgtgccccaaccccttctctgctttcctggagggcaagaaccccccaccccttctccgtgtctctactcttttctctgggctttcctccttcactataggtaagtttccaccttccattcctccttctcccttagcctgtgttctcaaaaacttaaaacctcttcaactcacacctgacctaaaacctaaatgccttattttcttctgcaatgccgcttgaccccaatacaaactggacagcagttccaaatagccggaaaacggcactttcaatttttccatcctgcaagatctaaataattcttgtcgtaaaatgggcaaatggtctgaggtgcctgacgtccaggcattcttttacacatcagtcccttcctagtctctgtgcccagtgcaactcgtcccaaatcttccttctttccctcccgcctgtcccctcagtaccaaccccaagcgtcgctgagtctttctaatcttccttttctacagacccgtctgacctctcccctcctcgccaggccgagctaggtcccaattcttcctcagcctccgctcctccaccctataatccttctaccacctcccctcctcacacccggcccggcttacagtttagttccgcgactagctcctccccacctgcccaagaatttcctcttagagaggtggctggagctgaaggcagtcagggtacatgtacctttttctctatcacgcctctctcagatcagtcaacgtttaggcactttctcatcagaccccactaaacatatacaggaattccaatatctaactctgtcctacaacaacctggagtgacttaaatgtcatcctgacttctaccctctccccagatgaacgggaaagagtttgttctctagcccaatctcatgctgctaaccactggcttcatgagccagacctccaggaaggcattagagcagttccccgagaggatccccagtggaactaccaggcaaattccccaggtatagctaggcgagattacatggtttcctgcctagttgaagggcttaaaaaagcagcttacaaagctgttcattatgacaaacttaaagaaactacccaaggtaaagatgaaaacccagcccaggtcatggctcgtttggcagcaacctttagacgctataccgccctagaccctaaaaggtcaaaaggccgtcttattctcaacatacattttattacccaatctgctcccgacatgaaataaaactccaaaaactggaatctggccctcgaaccccacaacgggacttaattaacctcaccttcaaggtgtgtaataacagaaaaaagttgcaattccttgcctccactgtgagacaaaccccagccacatctccagcacacaagaacttccaaatgcctgaactgtagcagccaggcgttcctccagaaccttcttcccccaggaacttgctacacatgctggaaatctggccactgggccaaggaacgcccgcagcccgggattcctcctaagccgcgtcccatctgtgtgggaccccactgaaaatcggactgttcaactcacctggcagccactcccagagcccctggaactctagcccagggctctctgactgactccttctcggcttaccggctgaagactgatgctgcctgatcgcctcagaagccccgtagaccatcacggatgccgagctttaggtaactcacagtggagggtaagtctgtccccttcttaatcagtacggaggctacccactccacattaccttcttttcaagggtctgtttcccttgcctccataactgttgtgggtattgacagccaggcttctaagcctcttaaaactcccccaattctggtgccaattagacaatactctttcaagcactcgttttcagttatccccacctgcccagttcccttattaggctgagacactttaactaaattatctgcttccctgactgttcctggactacagctatatctcattgccgcccttcttcccaatccaaagcctcctttgtgtcctcctcttgtatccccccaccttaacccacgagtataagatacctctactccctccttggcgaccgatcatgcaccccttaccatctcattaaaacctaatcacccttaccccactcaacgccaatatcccattccgcagcacgctttaaaaagattaaagcctgttatcactcgcctgctacagcatagccttttaaagcctataaactctccttacaattcccccattttacctgtcctaaaaccagacaagccttacaagttagttcaggatctgcaccttatcaaccaaattgttttgcctatccaccgcgtggtgccaaacccatatactctcctatcctcagtacctgcctctacaacccattattctgttctggatctcacacatgctttctttactattcctttgcacccttcatcccagcctctcttcgctttcacttggactgaccctgacacccattaggctcagcaaattacctgggctgtactgccgcaaggcttcacagacagcccccattacttcagtcaagcccaaatttcatcctcatctgttacctatctgggcataattctcataaaaacgcacgtgctctccctgccaatcgtgtcctagtgatctctcaaaccccagcaccttctacaaaacaactcctttccttcctaggcatggttagcgtggtcagaattcttacacaagagccaggactgcaccctgtagcctttctgtccaaacaacttgaccttactgttttagcctagccctcatgtctgcgtgcaggggctgccgctgcattaatacttttagaggccctcaaaatcacaaactatgctcaactcactctctacagttctcataacttccaaaatctattttcttcctcatacctgacgcatatactttctgcttcccggctccttcagctgcactcactctttgttgagtcccacaattaccattgttcctggcccggacttcaatccagcctcccacattattccaggtaccacacctgacccccatgactgtatctctctgatccacctgacattcacctcatttccccaaatttccttctttcctgttcctcaccctgatcacgcttgatttattgatggtggttccaccaggcctaatcgccacacaccagcaaaggcaggttatgctatagtacaagccactagcctgcctcttagaacctctcatttcctttccatcgtggaaatctatcctcaaggaaataacttctcagtgttccatctgctattctactactcctcagggattattcaggcccccctcccttccctacacatcaagctcgaggatttgccccactcaggactggcaaattagctttactcaacatgccctgagtcagataactaaaatacctcttagtctagataaatactttcactggataggtagaggcctttcctacagggtctgagaaaccaccgcagtcatttcttccctcctgtcagacataattcctcagtttagccttcccacctctatacagtctgataacagatgagcctttattagtcaaatcagccaagcagtttttcaggctcttagtattcagtgaaacctttatatccctacggtcctccgtcttcaagaatattagaatggactaaaggtcttttaaaaacacacctcaccaagctcagtcaccaacttaaaaaggactggacaatacttttaccactttcccttctcagaattcaggcctgtcctgggaatgctacagggtacagcccatttaagctcctgtatagacgctcctttttattaggccccagtctcattcgacaccagaccaacttagactgtgccccaaaaaatacttgtcatccctactatcttctgtctaatcatactcctattcaccattctcaactactcatacatgccctgctcttgtttacacggccggtttacactgtttttccaagccatcacagctgatatctcttggtgctatccccaaactgccactcttaactcttgaagtaaataaataatctttgctggcaggactatgctgaatctccttaggcactctctaatcagatatcctgagtcatcccaattcttagaccttttatacctgtttttctccttctgttattccatttagtttttcaattcatacaaaaccgtatccaggccatcatcaatcattctatacgacaaacgtttcttctaacatccccacaatatcacccctcaccacaagacctcccttcagcttaatctctcccactctaggttcccacgccgcccctaatcccgcttgaagcagccctgagaaacatcgcccgttctctctccataccaccccccaaaaatgttcgccgccccaacacttcaacactattttgttttatttttcttattaatataagaaggcaggaatgtcaggcctctgagcccaagccaaaccatcgcatcccctgtgacctgcacgtatacgcccagatggcctgaagtaactaaagaatcacaaaagaagtgaatatgccctgccccaccttaactgatgacattccaccacaaaagaagtgtaaatggccggtccttgccttaactgatgacattaccttgtgaaagtccttttcctggctcatcctggctcaagaagctcccccactgagcaccttgcgacccccactcctacccaccagagaacaaaccccctttgactgtaattttcctttacctacccaaatcctataaaacggccccacccttatctccctttgctgactctcttttcggactcagcccgcctgcacccatgtgaaataaacagccatgttgctcatacaaagcctgtttggtggtctcttcacacggacgcgcatgaaatgggctacatggagaaaccccatctctacaaaaaatacaaaattagttgagcatggtggcacagtcccagctactcgtgaggctgaggtgggagcatcacctgagcccagtaagtcaaggttgcagtgagctgtgatcgcaccactgcacttcagccttggcaacagagtgagaccgtgtctaaacaaacaaaaacaaaacaaaaaaacacccaaaaacagaaagggcaaatttgcccttgttcacttggccaaggtcacacagccatgaggtacaggggcaaacaatggacttgggccacactaatcgcagccgtcacccctactctgtcacatacaggcatctgtgtaaaaataaaataaaattacaattacaaaaataaagtagggccaggtgcgatggctcatgcctgtaaccccagcactttgggaggccgaggcgggtggatcacaaggtcaggagttcaagaccaccctggccaatatggtgaagccccgtctctactaaaaacacaaaaaaattagccgggtgtggtggcgggcacctgtaatcccagctactcaggaggctgaggcaggagaatcacttgaacccagaaggcagaggttgcagtgagccaagatcgtgccactgcactccagcctgggcgacacagtgagactctgtctcaaataagtaaataaataaaataaaatcaaaatagacctaccatttgatgcagcaatcccactcctgggtgtctacccagcggaaaagaagtcattatacagaaaagatacttgcacacacatgttcattgccacaatttgtaattgcaaaaatatggaaccagcccaaatgcccatcaatcaacgagtggataaagaaaatgtggtatatatatatatatatatgccatggaatactattcagccataaagaggaacaaaataatggcattcacagcaacctgggtggaatccgaggctattattttcagtgaagtaactcaggaatagaaaaccaaacatcacatgttgttactcataagtgggagctaagctatgaggtcgcaaaggcataagaatgatacattgaactctggggacttggggaaaaggtgggagtaggggtgatggataaaagagtacacatttggcatagcgtgccctgctcgggtgatggatgcaccaaaatctcagaaaacaccactaaataacttattaatgtaaccaaacaccacttgctccctaagactctattgaaataaaaaataagggccaggcatggtggctctgtggggaaaagcaagagagatcggattgttactgtatctgtatagaacgaagtagacataggagactccattttgttctgtactaagacaaattcttctgccttgagatgctgttaatctatgcccttacccccaaccccatgctctctgaaacatgtgctgtgtccactcagggttaaatggattaagggcggtgcaggatgtgctttgttaaacagacgcttgaaggcagcatgctccttaagagtcatcaccactccctaatctcaagtacccagggacacaaacactgcggaaggccgcagggacctctgcctaggaaagccaggtattgtccaaggtttctccccatgtgatagtctgaaatatggcctcatgggaagggaaagacctgaccgtctcccagcccgacacccgtaaagggtctgtgctgaggaggattagtaaaagaggaaggcatgcctctttgctgttgagacaagaggaaggcatccgtctcctgcccgtccctgggcaatggaatgtctcggtgtaaaacctgattgtatgttccatctactgagataggggaaaaccgccttagggctggaggtgggacatgcgggcagcaatactgctccgtaaggcattgagatgtttatgtgtatgcatatctaaagcacagcacttaattctttaccttgtctgtgatacagagacctttgttaacgtgtttatctgctgaccttctctccactattatcctatgaccctgccacatccccctctctgagaaacaccccaaaatgatcaataaatactaagggaactcagaggccgggggatcctccgtatgctgaacgctggtcccctgggcccccttatttctttctctatactttgtctctgtgtctttttcttttccaagtctcttgttccacctaacgagaaacacccacaggtgtggaggggcaacccaccccttcatgctcacgcctgtaatcccagcactttgggaggccgaggtaggcggattacctgaggtcaggagtttgagaccagcctgaccagcatggagaaaccccgtctctactgaaaatacaaaattagctgggtgtggtggcgcatgcctgtaatcccagctactaggaaggctgaggcaggagaatcacttcaacctgggaggcagagggagtggtgagccgagatcgcgccattgcactcgagcctgggcaacaagagtaaaactctgtttaaaaaaaaaaaaaaattaaggccgggtgcggtggctcacgcctgtaattccagcactttgggaggccgagacgggcagattacctgaggtcaggagtttgagaccagcctggccaacatggtgaaaccctgtctctattaaaaatacaaaaattagcccggcgtggtggtgggtgcctgtaatcccagctactcgggaggctgaggcaggaggattacttaagcccaggagacggaggttgtagtgagccgagatcgtgccactgcactccagcctgaccgacagagtgagactctgtctgaaaaaaaaaaaaaattatataaatcaatacaaataaagttaatgtattttatttaacccactatatccaaaacattattatttcatgcaatcaatatgaaaaggttattcacgaattacttttcattcttttgttcttgttgtttttaaattaattctttttttatttttatttttttttgagatggagtcttgttctgtcgcccaggctggagtgcagtggcgcgatgttggctcactgcaatctctgcctcccggaatctagcgattctcctgcctcagccttctgagtagctgggattacaggtgtgcgtcaccatgcctggctaatttgttgtgcatttttagtagagatggggttttgccatgctggtcaggctggtctcgaactcctgacctcaggtgatccgcccgcctcagccttccaaagtgctgggattacaggcgtaaaccaccgtgcctggcctaaattaatactttaaattaattaaaatgcttttaaaaagtccagaacaggccgggagcggtggctcaagcctctaatcccagcactttgagaggccgagttgggcagatcacctgaggtcaggagttcgagcccagcctggccaacatggtgaaaccccgtctctactaaaaatacaaaaatcagctgggcttggtggtgcatgcctgcaatcctagctactcgggaggatgaggcaggagaatccctttaacctgggaggcagaggttgcagggagccgagattgtgccattgcactccagcctggacgacagagcaagacaacatctcaaaaaaaaaaaaaaaaaaaacaagaaagaaaaactaaaatggtaccatgttttgcgtttttattttttttattcttagttgtttttttttttttttttgagacatgatctcactctgtcacccaggctggagtacagtggtgcaatcatgactcactgaaacctcaaaactcctgggctccagccatcctcctgcctcagtctcctgagtagctggggtttcaggcacgtaccagcacatctggctaatttctttttttaatttttagtagagatgaggtttcactatgttgcccaggctggtctcaaactcccgggctcaagcaatcctccctccttggcctcccaaagtgctgagattacaggcgtgagcaactgtgcttggtccaaattggtattacgttttcaattcaggcttcagatagaaggtaccctagttttattgccaagaagagatataatttctataaaacaactctcctatctagctagttttaggaacactcctactggtcaaagtatataaaactaaggggaccagagttagctgtaacgaccttgggctccacatatgcctgtacttaagaaaattaatgaacattcttggaaggtggaatgcatcttttacacctgagcaaattgaggcttgggttacacagctctgcctggcgcatgtgatttattttctctctctttttgtttttaagacctagtcttgctctgttgcccagactggagtgcagtggcatgatctcagctcactgcaacctctgcctcccgggttcaagcaattctcctgcttcagcctcccgagtagctgggattacaggcgcccgccaccatgcctggctaatttttttgtatttttagtagagacggggtttcaccatgttggccaggttggtcttgaactcccaacctcagctgatccgccctcctcggcctcccaaagtgctgggattacaggcgtgagccaccgcacccggcctgggcaagtgatttctttctgcctaattgtctagtcattaaccggtaactgaaaatcacaaacaatttcaatcttaggactgattgcccagcagtcaattcatgcaagatacttttttttttaaattgaggcttccgtggatggtgaaaatcaaaattggaatgattttcatatggaacaatgaaaagcgcccctttctgagttttctagactgacctctgacctctgtttcggagggcccggctagggctggcctgggactgcagaggattttgttttatttcctgtggactaaattatgataggattttaggcaccagtagagggcgctgagacacaggtgggcgagcagaagacaggctgttcgaggggaagtaaacctaatcgcgttccctttaaactttgtaatgactcaccacggagtcaactgaggaagtaaaacttaataggaatagtctcagtgaacaatgccataaattgacacgcagccaagtgccaagttctgataacaaatcagtaagaaatgcaagttaaaggaatgccattgttcccttagggggaaaaaaacctcttctttgttaaagccagtgatgaccagcagagggtaaagccagttcagaaggtcaaccggcagttttagaaattaatatggtctcacgcatgaatattcttacagtaattctacttgggtgattcaactctgacaaaaatagcagagatgttttctattatttatttaatttacttacctttttgagacaaagtctcgctctgtcgcccaggctggagtgtagtggcgaaatctgggctcaccgcaacgtctgcctcccgggttccagcgattctcctgcctcagcctcccgagtagctgggattataggcacctgccaccgcgcccagctgatttttgtatttttagtagagacgcggtttcaccatgttggccaggctggtctcgaaccgctgacctcaggtgatccacctgcctctgcctcctaaagtgctgggattacaggcaaaagccaccgtgtccagccacaaactgtcttatcaatggcaactgtctcctgatctgttggcctcacaataactgaataataaagcttacgttttgccaggcgcagtggctcacgcctgtaatcccagcactctgggaggccgaggcaggagtatcacctgacgtcaggagttcgagaccagtctggccaacatagtgaaaccccggctctactaaaaatacaaaaattcgccgggtgtggtggcaggcgcctgtaatcccagctatacaggaggccaaggcaggagaatcgcttgaacccgggaggtagaggttgcagtgagcaaagattgcgccactgtactccagcctgggtgacagagctagaccctgtctcaaaaaacaaacaaacatacaaccccaccccccaaaagaccctacatcttaaaacaagaggcaaaattgccctccgttgagaaccactgttctagacttaatctgttagagtcatttatttattttatgcacagaataactttgcaaagaggaatgactttttatttgttccagattctaaaataatctatgcagtcttccgtgcaggttgagatacttaaaactctatcggcaaaggccgggtgtggtggctcatacctgtaatcccagcactttgggaggctgagatgggcggatcacgaggtcaggagatcgagaccatcctggctaacacagtgaaacccggtctccactaaaaatacaaaaaattagcctaggaggcagagcttgcagtgagcttgcagatcatgccactgcactccagcctgggtgacagagtgagattccatctcaaaacaaaacaaaacaaaacaaaaactatcggcaaagtcacagccatggctaattatcatacgtttgttcagcaaattcaccttctttttgcaaacataatttacaccgtttaatcgggaattttacacaaaaaaaaagattctagaaaacatagctgtccataactgtcatggtttccaggttgcaagttcataatcatttgaattattcaaatgagtctctaaatgctacaaaaataatgtcttctacaatgacaagttatggaataaatatatagttgatcctaatttcaggacacttggtatgtaaatatttgctcacgtttttctttgatacgtacacaaagactaatgagtaaacctgtgctcacttatgtcatagctgcttgaaggtttttgttttgttttgttttgttttttttgagaccgagtcttgctgtgtcacccaggctggagtgcagtggcatgatctcgggtcactgcaagctccgcctcctgggttcacaccattctcttgcctcagcctcccgagtagctgggactacaggtgcccgccaccacgcctggcttttgtgtgtgtgtgtgtgtgtgtgtgtgtgtgtgtgtgtgtgtgtgtgttaaaagagacggggtttcaccatgttactcaggatggtctcgatctcctgacctcgtgatctgcccaccttggcctcccaaagtgctgggattacaggtgtgagccaccgtgcccagccgaagttttgttttttgtgtttttttttaatttaagcaaacatatggtttttgttttttatttatttgtttttgagacagggtcttgctctgttgtccaggctggagggcagtggcaagatcacagttcactgcagcctcaaccttccaggttcaagcaatcctcccacttcaaccccccagctggctggaattacaggtgcacaccactatgcccaactaatctttgtatctttttgtagagacggggtcttactatgttgcccaggctgaaatatatgtattttaaggaaaggatgaagtaaatagtattttagtatataaataagagttgagtatcctttatccaaaatgcttggggccagaagcgtttcggatttctgatttttcagattttggaataattgcatataaccacaacaaccaacatttactgagcaccacgtactgtgtgtcaggcaatgatctgagccctttacatgcattaagttacgtaatcactcaacaacccacgaggtgtgtattgtcatcagtttcggtccacaaaggggaagcagagcggagaggaaacctgcgcaggagtgcgcccaataccttttgctgtgtaacaagccttcccctcctgtgaaagggccctatgtgcaaagcagcccccaaatacacatggagttaagaaactgaagaatgaggcaaatccaggttatcaatataaagtttcattttcttcttctttatttgagatggagtcttgccctgacgcctgggctggagtgcaatggtgcgatctcggctcactgcaacctccacctcccgggttcaagagattcttctgcctcagactcctgagtagctgggattacaggcgcccaccaccacgcccagctaatttttgtatttttagtagagatggggtttcgccatgttggccaggctggtctcgaactcctgacctcaggtgatccgccccgcctcggcctcccaaagtgctgggattataggcatgagccacggtgcccagcccctccctcctttccttccttccttccttcctaccttccttccctccctccctcccttctttctctctttcttctttttgtggagaaggagtcctgctcttttgcccaggctggagtgcaatggcgcgatcttggctcactgcaacctccacctgccaggtttggcgattctcctgcctcagcctcccgagtagctgggaccacaggcacccaccatcacggcacggccaactaatttttgtatttttagtagagatggggtttcaccatatcggtcaggctgggtctggaaatcctgaccttgtgatccgcccgcctcggcctcccaaagtgctgggattgcaggcgtgagccactgcgcccgcctagttcctgttctgaagtttttaataaactttcactaatgctctaaagcttgccttggtctctcctgccttattcccccagtggaattctttcttctgaagaggcaaaaatggaagttgctgcagactcatacgcattctccgctgctaacatactttggtgctctgtgactcagatactttccctactgacattcaagtacaataaataaaataaaataaaataaaagaatggtaggtctcatccgaaggctctaggagaaaatcagattaaaaaaagaaagaggccgggcgcggtggctcacgcctgtaatcctgtaatcactttgggaggccgaggcgggcagatcacgaggtcaggagatcgagaccatcctggctaacacagtgaaaccccgtctctactaaaaatacaaaaaaattagccgggcgcggtggcgggcacgtgtagtcccagctaccgggaggctgaggcaggagaatggcgtgaacccgggaggcggagcttgcagtgaaccgagattgcaccactgcactccagcctgggtgacagagcgagactccgtctcaaaaaataataataataaataaataaatagaaaaaagaaaaaataggccgggtgtggtggctcacacctataaccccagcactttgggaggccaaggcagtcagatcacttgaggccaggcgttcaagaccagcctggcaaacatggtaagaccctctgctaaaaatttagccagacatggtggcattcacctgtaatcccagctacttgggaggctgaggccccaaatcgcaggaggtggaggttgcagtgagccgagatcgtgccactgcacttcagcttgggcaacagagccagaccctacctaaaaaaaaaaaaaagttgatattctatgtataatatactatattcttacaataaaggaagctagagaaaagaaaatgttatcaagaaaatcagtgtgcggccgggcacagtggctcacgcctgtaatctcagaactttgggaggccgaggtgggtggatcacgaggtcaggagttcgagaccagcccttatcaacatggtaaaaccccatttctaataaaaatacaaaaattagctgggcctggtggcacgcgcctgtaatcccagctactcaggaggctgaggcaggagaatcgcttgaacctgggaggtggagtttgcagtgagctgagattgcgccactgcactccagcctgggccacagagtgacactccatctcaaaaaaaaaaaaaaaaaaaagaaagaaaatcataagaaggagaaagtagtatattcactgttcattaagtataagtggatcatcataaaggtgttcatcttcatcatcttcaggttgagtaggctgaggaggaagaggaagaggaaggctgtctccgggtggcagaggaggaagaaaatccctggataagtggacccacgcagttcggacccgtgttgttcaaggatcaactgtatacacgcttatatttctcaaaaacaccctatgagttcagagcttgccagatgtagaggacctcacagttgacaacctgagtgacagctgtcaactcatgtgtcctatgtctccccggtatttatggagagcccagctgggctccataacccagtccttggggatctgtttcccaaatgcctctctccaaacgttgccggctgccagatctcatgttttactcctcttcccctcgttcactctcctccagcacagcgttcattttactctttttagaacaggcaaaacacactcccacctccaggcatccggatctgctattccctccaccagagatgctctccttggaggcatgcgggccccacatcaagcactgtctctggagaggctttctctcgtcacctctcctagaattgcattggttactcctgctctcatgcccagctttttttctttatcacacacgtcactgtctgacatagtgtgacatgtctgtgtgttcctgtgggtaattattggtcttcccttaaagtgcaggaatgccatgaggacagggactttttttgtttttgttttaagacagggtctgtctctatcacccaggctggagggcagtgatgtgatcactgctcactgcagccttaacttccctgggttcaagcaattctcccatctcaacctcccgagtagctgggaccacaggcacatgccatcatgcccggctaatgtttgtatcttttttttgtagagacagggtcttgtcatgttggccaggctggtttcgaactcctggcttcaggtgaaccactgcctcggcctcccaaagtgctgggattacaggcatgagtcaccatgtctggctaaggggactttgttctttttttttttttttccggagacagtctcactctgtcacccaggctggagcgtgcagtgctgtgatctcggctcactgcaaccctctgcctcccgggttcaagcgattctcccgcttcagcctcccgagtagctgggactacaggcgtgcaccaccacactcagctcagtttttgtattgttagtagagacgggggttttgccatgttgcccgggctggtcttgaacacctgggctcaagtgatcctcccacctcggcctcccaaaatgctgggattacaggtatgagccaccacgcccggcctagaggactttattttcttcatggctgtatctgcagtgcccgtctgtaacagggcacaatgcactctaggatacttgccgagtgagggaatttcccattagctagtgtagcttcatttctcctgctgcagcccatgcaagaccaccagcatctttcccaaggaccctcgtcttctgtaccctgttcacttgacatcctcatcaagttgatatctttccgccacccagcaagattcttttatttatttatttattatttattatttttttttgaggcggagtctcgctctgtcgcccaggctggagtgcagtggtgcgatctcggctcactgcaagctccgcctcccgggttcacgccattctcctgcctcagcctcccgagtagctgggactacaggcgcccaccaccacgcccagctaatttttttgtatctttagtggagacggggtttcaccatgttagccaggatggtctcgatctcctgacctcatgatccgcccacctcggcctcccaaagtgctggccatcgcgcccggcctaagattcttttaaaaacagaaaccagattgtgtcatttccaatcctaacaacccctaattgcttccttttccactttgaacaaaagccagcttctttacggtgtcctaaaacgccttccatgatctggatcctgttagccttggctgctttccttcctacctccaggttcctcagctctccctgtctgatccaccccattagccgctgcgctgtttttcatacaccagaaaggatgcctttactcagggctcttacgctaacccttccctgtgttgtaacatccaggcttccttaggatctccaggtagcccctcctcctcattctgtagttctcagctgagacattacaaccgcagcttcctcaaaaaattaaaaatagaaacgtcatgtgatccagcaatcccactgctgggtacgtttccaaaggaaatgaaatcagtatgtggaagagacgcctgcactcccgtgtttatgggagtactgttcccagtcgccaagatgtggaatccacctaggtgtccaccaatggatgaacgcaccaagaaaatggggtgtgtacgcacaatggaatactaggcagccttaaaaaagaaggaaatcctggcagggcgtggtggctcatgcctgtaatcccagcactttgggaggccgagatgggcggatcatgatgtcaggaattcgagaccagcctggccaacatagtgaaaccctgtctctactaaaaatacaaaagttagccaggcatggtggcgcacgcctgcagtcccagctactcaggaggctgaggcaggagaatcgcttgaacccgggaggcggaggttgtggtgagctgagatcacaccactaccctccagcctgggtgacagagctaggctccatcttaaaaaaaaaaaaaaaaaaagaagaaggatatcctgtcatttggaacagcatggatgaacctgaggacatacgttaaataaagtcagccaagcacagaaagacatatactgcatgatggcactcatatgtggaatctgaaaatgtggcactcatagaagtaaagagtagaatgggggttcccaggggctggagggagtccgggggtggaggaggaagagagggaatgggaagttcttttttgagacggagtttcgctcttgttgcccaggctggagtgcaatggcatgatctcagatcaccgcaacctccgtctcccgggttcaagccattctcctgcctcagcctcccaagtagctgggattacaggcacgcaccaccatgcctggctaatttttgtatttttagtagtgattcaccatgttggccaggctggtctcgaactcccaacctcaggtgatcctcctgccttggcctcccaaagtgctgggattacacatgttagccactgtgccaatgggaagttcttagtcagagaatacaatgtttcaggctaggcacagtggctcacacctgtaatcccagcactttgggaggccgaggtgggtggatcacgaggtcaggagttcaagaccagcctgaccaacatggtgaaaccccatctgtactaaaaaaaataaaaataaaaaaattagctgggcgtggtgctgcgagcctgtaatcccagctactcgggaggctgaggcaggagaatcacttgaacctgggagacagaggttgcagtgagccgagatcgtgccattgcactccagcctgggcaatagagtgggactctgtctcaaaaaaaaaaaaaaaaaaaaaaaaagaaccatattcttgaaaaccactgacaatagattttaagtgctcacaccataaagaaataagtatgtgaggcaatgcacgtgttcaacagcttgatttagccactccacaatgtatacatatagcaatacattatgttgtacaccataaatacatacacttttctttttcttttttttttttttgagacagagtcttgctctgtcgacaggctggagtgcagtggcgccatctcggctcactgcatcctccacctcccgggttcaagcggttctcctgtctcagcctgccaagtagctgggattacaggtgtgtgccaccacacctggctaattttttgtattttagtagagacgggtttcaccgtgttggcagggtggtcttgatctcttgacctcgtgatctacctgcctcagcctcccaaagtgctaggattacaggcatgagccaccgagcccggccaacacatacacttttcatttgtctatttaaaaaaatcactactggccaggcgcggtggctcttgcctgtaatcccagcactgtgggaggctgaggcgggcggatcacttgatgtcaggagtttgagatcagcctggccaacatggtgaaaccccgtctctactaaaaatataaaaattaggtgggcatggtgggcgcctgtagtcccagctactcgggaggctgaggcaggagaatcgcttgaacccaggaagcggaggctggcagtgagccaagatcgcgccactgcactccattctgggcaacagagcaagaatctgtctcaaaaaaaaaaaaaggaaagaaaaaagaaatccttgccaatcctgatatcccagagatgtttcccaatgccttgctcttgaatatttatagttttatctttcacacttagacatgtgaaccatctagaaatgtatttggggtacggtgtaaggtcggggtcctggaccgaatacagctccacaaaaatgtctgttctcgactgcaaaaaagcaatgtgactttgtgcacagatcaagtgcatctgtttctgaaatctgtagtgttctgtgtcatcagcctgcatttccatggttgcgacaataccacattatttgcctcatttcctaccgcagttcctcaatcactctgaattcagcggcactagcctcattgctctcggatgagcacacctattgtgtaccactcagggcgcctgtgtctggactggcagcctttcttagatgctttgggtggtggttctgtcttatccttcagccagcagctcagagtcctcccctcaaaaggcctttccctgaccactccatctaaagtagctcaccccagcctcctatatctttttttttttaataatgcaacagagaaggtgatataggtgcattgacaggccttcttttattagcttgagccattattattattattattatctgagatggagtcttgctctgtcacccaggctggagtgcagtggcacgatctcggctcactgcaacctctgcctcccagggtcaagcaattctcctgcctcagcctcctgagtagctgggattacaggcgtacaccaccatgcccgactaatttttgtagttttagtagagatggggcttcaccatgttggtcagactggtctcgaactcctgacctcgtgatctgcctgcctcagcctcccaaagtgatgggattacaggcgtgagccaccgtgcccagccttcttcttcttcttcttcttcttcttatcatcatcattttgagatggagtctctacctgtcacccaggctggattgcagtggggcgatcttggctcactgcaacctccgcctcccaggttcaagcaattcccctgcctcagcctcctgagtagctgggacttgtattttttagtagagatggggtttccccatgttgcccaggctggtctcaactcctgacctcaggtgatccacctgcctcggcctcccacagtgctgggatgacaggcatgagccaccacgcccagccaccagtcccctatatcttatgttctggtacattttgctatacaaaaacaacttatgtgtgtgtttgctgactcattgtctctctcttgcatgtgtgaacagagcagcagcaataatgtttgcatgtcttgttcactggccatgtcccctgggcatagcatacggtagggaattcactttggatgaagaaaaatgatcctcttgcatccattcaggatgaatgcattctaccctcagagtcctctagggggcacccgcacatgaatgcgcccctgcagggcacagttcttgagttgtttttgtttaactggcctgcacctgttattttgtttgtgtgtgtgtttgggtttcttcttcttcttcttttttttttttttgagacggagttttgctcttgttgcccaggctggggtgcaatggcgcgatctcagctcacagcaacctccgcctcctgggttcaagtgattctcctgcctcagcctcctgagttgctgggattacaggcatgtgccaccacacccagctaattctgtatttttagtagagatggagtttctccatgttggtcaggctggtctcgaactcccgacctcaggtgatccgcccacctcggcctcccaaagtgctgggattacaggcatgagccactgcaaccagtctttttttttttttttttttttttttttttttaagatggggtcttgctcagtttgtccaggctggagtgtagcagtgcagtcacagctcactgcagcctcgcactcctgggctcaagtgagcctcctgcctcagcctcctgagtagctggaactataggcacaaccaccttgcctggctaattaaaaaaaaaattttttttttaaagagtcagggtcttgctatattggccaagctgatctcaaattcctgacctcaagtgattctcccacctcagcctcccaaagtgttgggattccaggcatgagccaccatgcaccaggtctggcctacagcttttaactacacatttagaaagagaaaccacaagtggtaaaagcctgggttctgccctagattacccgaaatgagctatttttatagaagcctcctgtgtgcaggggctcatgctaggccccaagggcaggcagaggttgttttttgttttttgttttttaatttgtttctttttgagacagggtctcactctgtcgcccaggctggatgctgtggtgcaatctcagacctgcaacctctgtctcccaggttcaaggaattctcctgccttggcctccggagtagctaggacaacaggcacgcaccaccacgcccagctaatttttgtatttttagtagagacggggtttcaccatgttggccaggatggttttgaactcctgacctcagatgatctgcccgcctcagcctcccaaagtgttgggattacaggcgtgagccaccgcgcctggcctaaggcagaggttgttgactggtctcagttgctgcttggaagggccccagtctcctgcagggagggagggaggatcccactatggctcccagaactttgcttcccagcaagaggcactaaatcaatcccatgcttgaggatggtgggccctgagagaaatgaatcttggcctccaagtgttcagactgtgtgggggacacctgctatttacatttgtgaaatggggctggtgaccttggctcagcgatgggctccatctcatctcctcctggaagcttgatggaggaaaagcatctacagccatttgttatcactgggctccttgcctgaaagattataaatacttcgttaaaatacatacatccatagtgatgtgttttgacttggtaatagatttcagggtagacgcaagcctcctcagccacccctgttttccagttgcccagagttcctccctttctgtttttactgatttcttctgtatctttctggaaatatccattgcatatatatacacacacagatatatatatatatgcatgtataaatgtgtgtgtatatatatatgtgtgtgtgtgccgatataagacattgttttaagtattttacgtgcattgagtcatgtaatataaatatacttttatattgctaatacattaatatgtttaaaataagaaaattatacaggccagatgcagtagttcacacctataataccagagctttgagaggtcgaggcaggaggatcacttgaggccaggagttcgagaccagcttgaacaacatagggagacccctgtgtctacaaaatataaaataaaatataaaaaataaaacccggctaggcacagtggcttacacctgtaatcccagcactttgggaggctgaggtgggcggatcacaaggtcaggagtccaagaccagcctggccaacatagtgaaaccctgtctctactaaaaatacaaaaaaaaaaaaattagccgggcatggtggtaggcacctgtgatcccagctactcaggaggctgaggcaaagagaatcgcttgaacctgggaggtggcggttgcagtgagccgagatcacgccactgcactccagcctgggtgacagtgtgagactccatctcaaaaaatgaaaaataaaaataaataaattaagcccgcctggcgtggtggctcatgcctataatcctagcactttaggaggccgaggcaggcagatcacgagttcaggagttcgagaccagcctggccaacgtagtgaaaccctgtctctactaaaaatacaaaaaattagctgggcgtggcagcatgcgcctgtactccaagcttcttgggaggctgaggcaggagaattgcttgaacctgggaggtggaggttgctgtgagagccgagattgtgccactgcactccagtctgggtgacagggtgagactctgtctctaataaataaataaataagtaaaacaaaccctagccagggagacagctgtggtcccagctactcaggaggctgaggtaggaggatctctcagacttaagaggtcaaggctgcagtgagtcgtgatcataccactgcactctagcctggcaacagggtgagaccctgtaataaaatacataaacagtgatgtgttttgacttggtaatatatttccgggtagactgtaagcttctcatccatcccagttttcccattttccagcgttcctccccttctgttcttattgatgtcttctgtatctttttggaaatatccatggcatatatatatatatatatatatatatatacacacacacacacacacacacacacacacatatacacacatatacatgtgtgaatatacatgtgtgaatatatatgtactgatacaaggcattattctaagaattttacttttatttttatttttatttttttgagacagagtctcactctgttgcccaggctggactgcagtggctgaggctcactgcaacttccctctcccaggttcaggcaattcttgtgcctcagcctcctgagtagttgggattacaggcaccagccaccacacccagctaaattttgtatttttagtagagaagggatttcactatgttggccaggctggtcttgaactcctggcctcaggtgatccatctgcctcagcctcccaaagtgctgggattacaggcatgagccaccgcacccagcctattctaagaattttatatgcattgaatcatgtaatatagatataatttttttttttgagactgagtttcattctttgtccaggctgcaatgcaatggcatgatctcagctcactgcaacctctgcctcccaggttcaagcaattctcctgcctcagcttcccaagtagctgggattacaggcgcctccaccacgcccggctaatttattgtatttttggtagagatggggtttcaccatgttggcaaggctggtctcaaactgctgatctcaggtgatcccctgccttggcctcccaaagtgttgagattacaggcatgagccaccatgcccagcctgatataattttataaagctaatacattaatatgtctattttttattttttatttttttgagatggagttttgctcttgttgcccaggctggagtgcaatggtgcgatctcggctcatcacaacctctgcctcccaggttcaagcgattctcctgcctcagcctcctgagtagctagaattacaggcatgcaccaccaccccagctaattttgtatttttagtagagatggggtttctccatgttggtcaggccggtctcgaactcccgacctcaggtgatatgctggccttggcctcccaaagggctgggattacaggcgtgagccactgcgcccagccaatatgtttaaaatagaaaaattatacaggtcgggtgccaaatttttttgtagagacagggtctcactatgttgcccaggctggtcttgaactattggcttcaagcagtcctcctgctttggcttcccaaagtgctgggattacaggcatgagctgccctgtccggcaggctccttttaacaatcagctctcatgggaacaaatagagcaagaattcactcattaccctgagaagagcgccaagctcttcatgcaggatgggcctccacgacgcaaacacctcccacaaggccacaggcctccaacattcagaataaattttcttttttcttgagacagagtctcactctcttgcccaggctggagtgcagtggcgcaatctcggctcactgcaacctccacctcccaggctcaagcgattctcctgcctcagcctcctgagatcacaggcgctcgccaccatgcccggctaatttttgtatttttagtagagaggggatttcaccatggtggtcagtctggtctcaaactcctgaccgcaggtgatccacccaccctggcctcccaaagtgctgagattacaggtgtgagccaccgtgcccagcccaggatcaattttcaacatgagatttggaggggacaaataggtaaaccatataaatatccttatttttatgttttctcacctgtaagattgcatcctcatgcatcattgttcacttaggacttcctcctagaaagcttttcatttaggtaaacagagcttcctcatccttttaagaagatacagacatgtttgcattattgaatctgccatcgttcatctcaccagtcccctataagatggagtcttgatctatttccagtcttagaagtacattcagcaggggagttttacaaatcaaatagatttccttcgtcgttcccccaaaaatgcagcctacgtcttcaaaaccgaagacttcagtctattttgcttaaggatgacaaaagtcaccatctgttaatccaatctgcatcaggagaaaaacgaaaatcatctcatgcgcatgaaacctcctcttgggctatgtgaaggggaattcctgagggtctcttgccatgcagcagggagagcctctggctgtggtggctcttgtttggatccaagaagcagaggaggaatgtgttgaaggactttgagtaaaagcaaaagagccgggcgcggtggctcacgcctataatcccagcactttgggaggccgaggcgggcggatcacgaggtcaggagatcgagaccatcctggctaacatggtgaaaccccgtctctactaaaaatacaaaaaattagccaggcgtggtggcaggtgcctgtagtcccagctatttgggaggctgaggcaggagaatggcctgaacccgggaggcagagcttgcagtgagcagagatagagccactgcactccagcctgggtgacagcgagactccctctcaaaaaaaaaaaaaaaagcagaagagccacgacctggctcatgcctataatcccagcactcttgcgaggctgagacaggtggatcatctcaggtcaggagtttgagaccagcctggccaacatggtaaaaccccatctctactaaaaatacaaaaaaaaaattagccgggcatggtggtgcatgcctgtaatcccagctactcgggaggctgaggaaggagaatttcttgaacccaggaggcagaggttgcagtaaactgagatcgtgccactacactccagcctgggtgacagagcaagactctgtctaaaaaaaaagcaaaggatacatggaaaggctacggaatccggctcaggaatgtggcaggaggccaagaatagacagcagcaagaatgttcctaatatcagatgcagccacaccccggtggggaagccaccattaccaccaccaccactgggcactgccctcctgacattgactagtgacacctttgcccttgccactgtactttaattttctttctttctttttttgagacagagtctcaccctgttgcccaggcttcagtgcagtggtgcgatcatagctcactgcagaattgaacccacgggctaaagagatcctcctatctcagcctcccaagtagctgggaccacagttgtacatgaccacacccagctagtcagtgtttttctaaaaaaaaaattcatagagccagccgaggtggctcatgcctgtaatcccagcactttgggaggccgaggcaggcggatcacgaggtcaggagtttgagaccagcctggccaaaccctgtctctactaaaaatacaaaaaaattagctgggcatggtggccagagcctgtaatcccagctactcaggaggctgagacaggagaatcgtttgaactcgggaggcataggttgcagtgagctgagatcacaccactatactccagcctgggtgacagagcaagactccatctcaaaaaaaaaaaaaaaacccaaaaccaaaaaacatagatactaaattttgtcaaatattcttttagcatatataagatgatcatactgattttttttttactttgttaatatgataaagctcattaatggtttttgaatattagccattctgggctgggcacagtggcttacgggtggttttgggaaactgaggcaggaaaattgcttgagcccgggagttcaagaccagcctgggcaacatggcaaaaccctgtctttactaaaaacaccatgctgggcatagtggtacacacctgtattcccagctactcagaaggctgtggagggaggatcgcttgaggccgggaggttgaggctgtagtgagctgtgatcacgccactgtgatcacgcctctgcactccagcctaggagacccagagagactctgtctcaaaaaaaaaaagaaaaagaaaaagaaaaagaaaaaaaagccattttggcatttctggaataaaccccagttggtcacaatgtatttttttttactctaccgctggagtctgaatgctaatacaggctgacacactccaaaacccagagctctattctgagcctaaggagtccacacgaaatgaaggctgtgctaccgtgccatagccacaaagagcacttgaaacctggctagtgagactgagaaaccgaattttaaattttattattattattattatttattgagacggagtttcgctctggttgcccaggctggagtgcaatggcgcgatcttggctcactgcaacctctgcctcccgggttcaagcgattctcctgccttagcctcctgagtagctgggattacaggcaggcatcaccacgcccaggtaattttgtatttttagtagagccgcggtttctccatgttggtcaggctggtctcacactcccgacctcaggtgatccgcccgcctcggcctctcaatgtgctgggattacaggcgtaaggcccccgcccggtctattattattattattattattattattattattattgagacagagtctcgctctgtcgcctaggctggagtgcagtggcgtgatctctgctcactgcaatctctgcctcctgggttcaagtgattctcccacctcagcctcctgagtagctgggactacaggcatgagcctccacatctggttaatttttgtatttttattagagatggggtttcattatgttggccaggctggtctcgaactcctgacctcaagagatctgcccgcctcagcctcccaaagtgctgggattacaggcatgagccaccgcgcccagccaatagagtttatttttaaaagcatttttaggttcacataaaaattgagcagaaggtacagagatttccctgtccccacacatgcacagcctccccaactaccaccatccccagctagtggtagatttgttacagtggatgaacctccgctgatttgacatgtcatcttcacccagggtccacggtttacactggggttcacttggtgtcatagaatctataggttcatacaaatgtataataatcagtatttaccactatggtgtcataatacagtttcattctcctaaaatatctcttactctgcctattcattgcaaccccaactctcctgacttttttcttattttttttttaaactttttaaaaatgttgctactacttctttgggagactgaggcaggtggatcgcttgaactcaggagttcaagacccgtcttcgtaactgagtgagaaccagtctctaccaaaaaaaaaaaaaaaaaaaaaattagcctggcatggtggcgagcacctgtagtcccagctactctggaggctgaggcaggaggattgcttgagctctggacgtcgaggctgcagtgagccgagatcacgccactgcactactccagcctgggcggcagagcgagaccctgtttcaaaaaaaaaaaaaaaaaggaagcagaaatgcattcacaggctttgctgctaggtggttattattttttgtttgtttgtttgttttttgagagagagtctcagtcactctgtcgcccaggctggaatgcagtggtgtgatctcaggtcactgcaaactctgactcccaggttcaagtaattcttctgcctcatcctcctgagtagctgggattacaggcatgcaccaccatacctggctaatttttgtatttttagtagagacagggtttcaccatgttggccaggctggtcttgaactcctggcctcaagtgatccgcctgcctcaacctcgcaaagtactgggataacaggcgtgaaccactgcacctggccaatcactactttgtgtgtccagaaaattttcttcctcctaaaaagaaatcttctacacttgtatcatccccatcccttgagtgtgggaggaacgtgttactttcttctaaccaatacggcatggcaaaggtggtgcttatatgttgtagaagatttcttgctagctgacacaccctagagtctctcatcactgactttgaaggagcatgcactgatgagttgatgagggttttttgtttgtttttttgtttttttttgagatggagtctcgctctgtctcccagcctggagtgcagtggtgcgatcttggctcactgcaagctccgtctcccaggttcacgccattcttctgcctcagcctcccaagtagctgggactacaggtgcccaccaccacgcccggctaattttttgtatttttagtagagacggggtttcaccgtgttagtcaggatggtctcgatctcctgacctcgtgatgtgcctgtctcagcctcccaaagtactgggattacaggcgtgagccactgtgcccggctgagttcttttttttttttttttttgagacagggttttactctgtcatccaggggctggagtgcagtggcgtgatctcggctcactccaacctctgcttcccaggctcaagtgattctccagcctcagtctccccagtagctgggactgcaggtaccaccaatacctggctaatttttgtatttttatagagatgtggttttgctatgttgcccaggctggtctcctgagctcaaaacaatctgccctccttagccttccaaagtgctggggttacaggtgtgagccaccgtgcccagcccctgatgagttctaaagtcacaaggaaacaaattctgcagcaagctgagtgaatttagaagcacgtcctttcccagcggagccttcagatcaaaactcagtgccgggccgggcgtggtggctcacgcctgtaatcccagcactttgggaagccaaggtgggcagatcacttgaggtcaggagttcaagaccagcctggccaatgtggtgaaaccctgtctctactaaacatatgaaaattagccggggtgatggcatgtacctgtaatcccagctactcaggagactgaggcaggagaatcgcttgaacctgtgaggcagaggttgcagcgagccgaaatcgtgctactgcactccaacctgggcgacaaggtgagactccatctcaaaaacaaacaaaccaacaaacaaaaaacacaaaaacaaacaaacaaacaaacaaacccaaaactcagtcctggccaataccttgattacagcctcacagagaacctggctaaactgtgctaagctccatagaaactgtgagataataaatgcacacatatatatgcatatatatgatatgtgtgtgtgtgtattttaaatccaacgaaatattctttgagtaggaacattgactatcaaaaagagaagaattgtaacagcaatagtaaggttatgagaagaatgtctttagagatgaaaaagaggaaaagaattgacggctgggcacggtggctcacgcctgtaatcccagcactttgggaggccgaggcaggtggatcacctgaggtcaggagtttgagaccagcctggctaacagagtgaaaccccatctctactaaaaatacaaaattagccggacgtggtggcccatgcctgtagtcccagctattcgggaggctgaggcaggagaattgcttgaacccaggaggcagaggttgcagtgagcagagatcgcaccactgcaccccagcctgggtgacagagtgagactccatcttaaaacataaataaataaataaaaagaaaagaattgacctgagatgaaaaaaacaacttatttgtttttagaggacagtcctagaaatgtagccaggtggctggacgcggtggctcatgcctgtaatcccagcactttgggaggccgaggcaggtgggtcacctgaggtggggagtttgagaccagcctgaccaacatggtgaaaaccccgcctctactaaaaatacaaaaaaatttagctgcgtgtggtggtgggtgcctgtaatcccagctactggggagactgaggcaggagaatcgcttgaacctgggaggcagaagttgcaatgagccaagaccacctctttgcactccagcctggatgacaagagcgagactccgtctcaaaaaaaagaaaagaaaaaacacacacattggtgtcagacgtgttgcgagtggaaaccacttcgtaatctttatcccaagtgaactctccccctaaaacctctattacagggaatgctatgatgccatgtggtagatcagatgaccactctgaggatctggatcagcctccttccctggcatcctcagggcttgctccataggttcaggagcaaagtggccgaggtggactacaccacctacgtcactgatgaatgcccacctagctggcagtagcaagtgctgatcccccagtgtggtacagtttcctaggaagaccaaaaagccaaatacctgggcccgtgaggattacactggagccctttcatcctgggctgggcagggagtttttcctccctcgagtaaacaactctgggcttgttatttgcttttcttgccctttgcacttctgccaacagcagcatctgtgtatgcactgaatggccctattcaccctcatgttaacccgcacagtattgcttctgatcaaggagctccatatattaggaagtcagtggggggcagtccatgtaccccattaccccaaagcagccagcctcatggaacagcacggcctgtttgagactgggttacagggccagtttggagtcatcatctttggggtcggggtgctgttacaggatgggtaaccactctgaaccaggggtacatgccagatgatcccagattacaaagacctgtgaactcaagagtgccatttctttcttttatttttctctctcttttttttttgagacggagttttgctcttgttacccaggctgaagtgcaatggcatgatctcagctcactgcaacctctgcctcctgggttcaagcgattctcctgcctcagcctcccaagtagctgggattacaggcacatgccaccccgcccggctaattttttgtatttttagtagagacggggtttcaccatgttggccaggctgatctcgaactcctgacctcaggtgatccacccacctcggcctccctcccaaagtgctggaattacagacatgagttgctgcatcggccaagagtgccatttcttaggaccacacccgatgactcactcttcaaatttttatttgttttgttgttattttttgttttgagacagagtttcgctcagtcacccaggctggagtgcagtggcaatcttggctcactgcaacctccacctcccgggttcaagccattctcctgcctcagcctctggagtagctgggattacaggcggcgccacaacgcctgattaatttttttgtatttttaatagagacggggtttcatcatgttggccacgctggtcttgaattcccgacctcaggtgatctgcctgccttggcctcccaaagtgctaggattacagaggtgagccaccgtgaccggccttcactcttcaaatgtttgcttcctgttcctgctaccctgaaccctgctgttgaggggttctagtgtctacaagggaaccgctgccaccacgaggaataacacagtaagttgtgtaagtggagaccacctctgggccgtttggggtaccttgagtgtgtcactatggggttaggcagtgactaatttaggcaggaaggggaaagatttgctgctacacttggggccaaggaggcctgtgaatagaacctagaggcgtcccaggggagtctccaactaacaccatgtcccgactccctatctgtccacagccctccctccttggacaaggacaaggcctgatctgggtgcactgagacctccctcccctatgcagggcccagagtgacaaagagggtctgtgtccccttccctttgcagaagcacatcaagcccgcacacaggctctaccttcctctacccaaccccctctccactcctgcagacccccgccttcctgcaggtccccctccggcccctccctgctccgtagggcacgtagacccggatccccagctcccggaccccttccgactgctcccttcgccactcgcgcggcttccactcctggactcggcctccacccctgggcttggcctcaaagcctcctcagttgtcggccctggaaggtgcccagcggcggcagcgccagacgcgccccgttagctcagcgtcgctgagcatccgcagccgccaccaggccccgcccagcggccgcagccagccaggccgcgcccgggacgactgcagagcgcggtgagtgaacgcggccagagggagggactcaggcgtcccaggtccccgccctgcccctccccgggggcccgacatcccgaccctcagctccctctttttcttttggctccggcagtccgttttagggccgcagagccgccttttaaaaacacaccctgcatcccttccctgccctggggcttcgggcccaccagccccttggatcccttcccctcttgcaggatccgtgaatccagagccccaagccccagccccagccccatcctcattaaaattctgagtccctccctccatccaggagtcaggaatgtaggccaaaaatatcgctgccttccagacccaggcggctaggcttgcaacacctgctcggaaaacccgagtctgagctttaatggttctattatgatgatcatgatgatttatttttaatagagcagagtctccttatgttgcccaggctggtctcgaactcctgggctcaagggatcctccctcctcagcctcccgaaatgctgggattacaggcgtgagccaccgcgcccaggcctgattgttcttttgagccaagaatctgggcctcagcctaggcatcctgtggagcccaggaatccgggcccccaactgctaccgcgctagctcccaggaattttgcccccaacacaccccacccctatccactgtgatatctgagacctgcgtccagcccgagtcccttaccctgcggcgcccggtgccagtgggtactaggggagcattttgccgccccttcaagtccttaaatacaggaatctagcctctgtttcttggggagacccatcagtcagggatcgtagcccagaaccacctaaagcccaggaatactgctctcaattctgctctccctcagggctccaagagacagagatcctagcccccccattgaactgaggggcctggtcccccaatccgctgcgacccaggtgtctaaggtttcatccggcaaggaaggggtgggggcggaacagaccaggaaggagggggtaggaagggagcggaagaaaggagtgaggtgagacgggggcggggacctgagctggggggctctgcactaaacaaaccctaaacatgcggggtttctatggtaacggtcttccctggcctacccgggagactcctctagggctgtgtcgaggagggcagcccccaggagtctccacgccgccagctgttgtgtcttcctgttttgtcaccacggcaaccgtgacctcagccctccaccctgctcactggggtggggcgggagctccacgctacttttactctggggggcgtggtctgctcttggccccgcctcggggcggggctgggatagcccagactcggggaagtccctgtccaccgccctagccggagctgcgccccgccccggccccgcccccgtcccgcccgcgctggctccccagccctccaaccccacccagccctcagacccttccagctgccgctgtcgtctttgcttcagccgcagtcgccactggctgcctgaggtgaggttgtggggaccccagagggcataagcaacagtctagggtctttatggccagagagaggaatgggctgggtctcagaatgtctgggtccctagaaagactggggctgggccaggattcttggggttctgcagaggagagggctgaggacctggactgtggaggtcatacgtctggaagagtggggaaggggacctggactccggggtctgagggaggaggggctgggggtctggactcccgggtccgaggcaggaggggctggggggtctggactcctgggtccgagggaggaggggctgagggcctggactcctgggtctgagggaggaggagctgggcctggactcctgagtctgagggaggaggggctgggtctgcgggagtagagagatggggactcgtaggtgccctagttggaggctggaatctggtacgtggaggtcctttaggaggggaagcgcttagggttaggtgtcctgggtttgggaatgagaatggaaggaattcagaattactgacccctccccatccaggggacagacagaatcggaactttgggctcctgaaaggccgagggaggggggtgttaagatccagccccgtgcttccgaagtgcagaaggagctgggaaaggaggagaagacagggctgcgtcccgcacctctgggtgccgagagccgaagctggggttccggggcccgattctcagcgtgagcgatgggtgtggcgtctggagtggacgagggaggacactgaggggctgggtgtggcccggagagtcgggtgcgctgcgaggaatcccggaggggtgtttcctcaccctccagggtctggctgcgcattcctgagctctgatctcgggcgatggctggaggccctaagggcggggtggacccctcccctcccctcccctcggcgcgcccccctcccctgcgcgcccccctccgcggctagcccaccttccgcgggggacagaatgagtgacgccctcgctcgtcctcctcccctgcttgggacggggcagtagcccgccttctagagcacgggacgctgggccagtcccgatttccttctccttcgagggtcctggaggggcgtgggggcaggcagtgtctggctccgggtggagcctcccaggtgctcccgcaagccccgaatggcgattagggaggccgtgggaggcgtagctgggcctcgggcctgacgccagcaccgcgtgcagtttccggcctggagcctgagcccctcagaggcccgggtccctgcccactccggtcttagagatgctcttgggggggctctcagcccatgtttatagggatccagaaatgcaggcctccaaccctgagagtcggggtccccaccccccggaaatccgggagagggcgggcagccccggaggcgggcgggggtccgggcaccgcctcctggtccctgacacattccagatgcctgggccgactcgaagcccttataaggcgcggagacaccggctctggctgggccgcccgcctccacagccgccgcccagggttctcccgccactgccgcccgcacccccgcccccgcggggttaagatcacacacgcgcccacgccggcccgcggggcgtgcactttcgctgggttccgtccgccgcagcccaaacagttaactgaacggggaggggagggggcggggcttacccggggtcaccgccagggccctgctgggttccacgccacgttcctgtctccgcagggcgttcgatccctagagggaggagcctgtccaaacggacgctaacggcctacctccccctcaggtgctcttacagcctgttccaagtgtggcttaatccgtctccaccaccagatctttctccgtggattcctctgctaagaccgctggtgagtaggcagcgggcctggactccggggtccgagggaggaggggctgggggcctggactccggggtccgagggaggaggggctgggggcctgggctcctcggtccgagggaggaggggctgggggcctgggggcctgggctcctgggtccgagggaggaggggctgggggcctgggctcctgggtccgagggaggaggggctgggggtctggactccggggtccgagggaggaggggctggggtctggactcctgggtccgaggaaggaggggctggggtctggactcctgggtccgaggaaggaggggctgggggcctgggctcctgggtccgagggaggaggggctggggtctggactcctgggtccgagggaggaggggctggggtctggactcctgggtccgagggaggaggggctgggggcctggactccggggtccgagggaggaggggctgggggcctggactccggggtccgagggaggaggggctggggtctggactcctgggtccgagggaggaggggctgggggcctgggctcctgggtctgagggaggaggggctgggggcctgggctcctgggtctgagggaggaggggctggggtctggactcgtgggtctgaaggaggaaggattaggtcctgggctcctagatcctgggagaaggaccaggaagcttgggctccaaggaatagggtcccagacactgaggtatctgaggaagaagcgagtccaggccctggctcctttgtctcagggagctgctgtcctgcgactgccacgaagaggttaaggcctgtgctactgccctgcaaagtgcctgaagctgaaaggaggaagttactttcctgtggctaggagaggccttgggtttagtcctgtggctgcgttgagacagtttacagcctaaggaaagaactgggcacctggtttctaagaggacgggcacttgattcctgggggccattaggacaaggaggtggaagctgtaggttttgcaaggactaaagaagcaaattggttttctggagtctggggcatctgggatccttcaggctaagggtccagggccagaggtctgaccccttataacaggacggtgatggccaggcgcagtggctcatgcctgtaatcccagcactttgggaggccaaggcgggcggatcacttgaggtcaggagtttgagaccagcctggccaacatggcgaaaccccatctctactgaaaatacaaaaattagccgagcatggtggcacacacctgtaatcccagctactcaggaggctgaggcaggagaatcgcttgaatccgggaggcggaggttgccgtgagtcaagatcgcaccattgcactgcagcctgggtgacagagcgactccatgtaaaaaaaacaacaaccaaaaaacaggattgtgaggcctagagagagttcagtggaagggcctggggttcctactggacagttggaaatctggggagctgagtttcccagaagctgggggaccagctggctgggttttggggagagaaggtggaggtagatggactcagtatgcaggagtgtggagggggaggctcaaactagcttttttgggttgcagtactccagtcctaaatctcaggtgggagttagactgagagtgaaggttgctaatctccaaggtggggggtagggagaggaggaggccgctaagagtttaggctccttgtcagaagggaggggagatctcttggttttccacggctgggatctctatgagaagatatcctttatcgggaggtcggagctcttattagatgtgggtccctgagagtggaagcctggggaggttgggccgtttagaggctgcaaatgtctaggtcactgttcgatggaagaaggaagtttgctcacagggtctggggtgcagagctctgaatactgaaagaaaaggaagttgagagatggggttttcagagcctgtggaagacaagcgttttgttctgacacttgggttgtggcaggaggcagaaggaggatgctttattttttatttattttatttatttttattattttattttattttttgagatggagtttcactcatgtcacccgggctggagtgcagtggcgcaatctcggctcactgcaacctccacctctagggttcaagcgattctcctgcctcagcctcccaagtagctgcgattacaagcgcccaccaccacacccagctgatttttgtatttttagtagagacggggtttcaccatgttggtcaggctggtcttgaacttctgacctcaagtgatctgccagcctcggcttccgaaagtgctgggattacaggcatgagccactgcgcccagattattttattttttttgaggcggagtgtggctctgtggctcaggctggagtgcaggggttctatcttggctcactgcaacctctgcctcctgggttcaagtgattctcctgcctcagtctcccgagtagctgggattgcaggtgcatgccaccacgcccagataatttttgtattattagtagagaccgagtgtcgccacgttggccaggctggtctccaactcctgacctcaagtgatccacccaccttggcctccgaagtgctgggattacaagtgtgagccaccacacccggcctatttgtaattaaaaaaaattttttttttttgagtcagggtctcactctgtctcccaggctggagtgcactggtgcatcacagctcactgcagccctgaccccacaggctcaagcaatcctcccacctcagcatcccgagtagctgggaccacacgcacacaccaccacacccagctaattaaaaaatttttttttggtaaatgaggtctccctaaggttgcccaggctggtctccaactcctgggctcaagcaatcctcctgcctcagcctcttggagtgctgggattacaggcatcagccacacctgtgcctggccagaggggtggtgctatagagtacagagtgctaaatggctgagctactgagtcccttggggagggagggaaagagggaagcacggtatctggagtgggaagcaaacagtgtagttgtacagtagttaggtcttgaaagagagaagaatctcttgagaaggaggaaaataggggcctagactcctggattctgatacgagtaggggaggagtgagccttgaaccggaggggacaggctcatccctgtatgcccaggactgtccccatttgaaaacccaaggctgggcccggtggctcacgcctataatcccagcactttgggaggccaaggccagcggatcatgaggtcaggagatcgagaccatcctggctaacacagtgaaaccccgtctctactaaaaatacaaaaaaattagccgggcgtggtggcacatgcctgtaatctcagctactcgggaggctgaggcaggagaatcacttgaacctgagtagcagaggttgtagtgagctgagattgtgccaatgcactccagcctgggccacagagcaagactctgtctcaaaaaaaaaaaaagaaaagaaaaccgaaagccccacatcttgggaactccctaattagagctcatattaatttgtccctggggtaggcaatggctaagggacctggattcttatgtttgtgactgtataaggacactgtctttcccctttttgcagccatgccagtgacggtaacccgcaccaccatcacaaccaccacgacgtcatcttcgggcctggggtcccccatgatcgtggggtcccctcgggccctgacacagcccctgggtctccttcgcctgctgcagctggtgtctacctgcgtggccttctcgctggtggctagcgtgggcgcctggacggggtccatgggcaactggtccatgttcacctggtgcttctgcttctccgtgaccctgatcatcctcatcgtggagctgtgcgggctccaggcccgcttccccctgtcttggcgcaacttccccatcaccttcgcctgctatgcggccctcttctgcctctcggcctccatcatctaccccaccacctatgtccagttcctgtcccacggccgttcgcgggaccacgccatcgccgccaccttcttctcctgcatcgcgtgtgtggcttacgccaccgaagtggcctggacccgggcccggcccggcgagatcactggctatatggccaccgtacccgggctgctgaaggtgctggagaccttcgttgcctgcatcatcttcgcgttcatcagcgaccccaacctgtaccagcaccagccggccctggagtggtgcgtggcggtgtacgccatctgcttcatcctagcggccatcgccatcctgctgaacctgggggagtgcaccaacgtgctacccatccccttccccagcttcctgtcggggctggccttgctgtctgtcctcctctatgccaccgcccttgttctctggcccctctaccagttcgatgagaagtatggcggccagcctcggcgctcgagagatgtaagctgcagccgcagccatgcctactacgtgtgtgcctgggaccgccgactggctgtggccatcctgacggccatcaacctactggcgtatgtggctgacctggtgcactctgcccacctggtttttgtcaaggtctaagactctcccaagaggctcccgttccctctccaacctctttgttcttcttgcccgagttttctttatggagtacttctttcctccgcctttcctctgttttcctcttcctgtctcccctccctcccacctttttctttccttcccaattccttgcactctaaccagttcttggatgcatcttcttccttccctttcctcttgctgtttccttcctgtgttgttttgttgcccacatcctgttttcacccctgagctgtttctctttttcttttcttttttttttttttttttttttaagacggattctcactctgtggcccaggctggagtgcagtggtgcgatctcgactcactgcaacccccgcctcctgggttcaagcgattctcctgccccagcctcccaagtagctgggaggacaggtgtgagctgccgcacccagcctgtttctctttttccactcttcttttttctcatctcttttctgggttgcctgtcggctttcttatctgcctgttttgcaagcaccttctcctgtgtccttgggagccctgagacttctttctctccttgcctccacccacctccaaaggtgctgagctcacatccacaccccttgcagccgtccatgccacagccccccaaggggccccattgccaaagcatgcctgcccaccctcgctgtgccttagtcagtgtgtacgtgtgtgtgtgtgtgtgtgtgtgtgtgtgtgtttggggggtggggggtgggtagctggggattgggccctctttctcccagtggaggaaggtgtgcagtgtacttcccctttaaattaaaaaacatatatatatatatatttggaggtcagtaatttccaatgggcgggaggctttaagcaccgaccctgggtccctaggccccgcctggcactcagccttgccagagattggctccagaatttttgccaggcttacagaacacccactgcctagaggccatcttaaaggaagcaggggctggatgcctttcatcccaactattctctgtggtatcaaaaagaaaaaaaaaaaaaaagaaggagtcggggccgggcgtggtggctcacgcctgtaatcccagcactttgggagaccaagtcaggcaatcatctgaagtcaggagttcaagaccagcctggccaacatggtgaaagcatgtctctattaaaaatacaaaaattagccgggcgtggtggcgggcgcctgtaatcccaggtatttggggggactgagacaggagaatcccttcaacccgggaggtggaggttgcagtaagtcaagatggcaccactgtgctccagcctgggggacagagcgagactccatctcaaaaaaaaaaaggaatcggacgaagaaccacaggatgttgaagacaactgtctgaagtatttgtgagggacagcgatgtggccctctgtgttaagaataacgtgtcctgctttggcagagagaagaaaatagccactgcccgctttcaaggcaagatcgaccttttctgttttgttttgtttttctttctttttcctggccatgaggacaaaaattactgagtggcccttaaagagggaagtttgttttcagctgttctcttttgcccgtaggtgggagggtggggattgctgcgtcctagctagaggaatggctttgcttgaatgtgtagtgcacacgcacgggtgtttctgtgtgctagttgcttcttgctgctgcttcctgcttgtctgggactcacatacataacgtgatatatatatatatatatataaatgtataaatatatattttatttttttttaaatccctggagcttctggttcctatcagttcctgttgttaatcgtagaaccgttgtcccttcccccattcccgtatccatcatgttctttttcttttaaatatcaatataaaggtaaaagaaggacttgtgctttcttaatgaggagggcggccgagcacggcgggcggatcacttgaggtcaggagtttgagaccagcctggccaacatggtgaaaccccgtctctacaaaaaaataaaaaagaaaagcgggggaggactctcggagaggggcaagggccagattcttgggtctagtgggagaatagggttggtgccaagacaaccttggcctcatcagaagatactagctggatctaggtcttctaaatgacttcctcaaaccaggagggctgggtgggatagaaatgaactagacttctccctccttggagtctgtcccctgagcacctcacaaatacaacgtcctaatttgagtgaaggagctttcctccccagtcacctcgtcctcccaggtccccccatttcagtaatagcctctcagagctgagaacccaagcacatggtggtaccttccccccgtctactcaagtcagtccctcatcaaacactgtctattcttccccctaaataccatttctaccgccctcttctccaggttcctggtccagctcaagttccattttgtttcacctgagctattgccccagcctccttctcctccatcccaccctggctccagagggattctttcatcatgcagatctgatcctgcccttccctgctgaagtccttccgtagcccattgcctataggcactatcaaagcccctgggtctggccttcatgatctgatcccgcctccattcccactatcagctccctccttaccctccaatctaagcctctgaatatacctggtcaacagaagaccttcataaagatcaaatgagctactgcaaccaatctctgtcccacagaaggccatcttgtccatttctgtaggctccaaccctatggggcttagcaggtgttctccccatgtgcagagatgagagattgtaataaataaaggcacaagacaaaaataaagagaaagcagctgggcccaggggaccactatcatcaagacgcagagaccggtagtggcccataacggctgggctcgctgatatttattgcatacaagacaagggggcagagtaaagagggtgaatcttcgaagtgattgacaaggtgaagcaagtcacgtgatcacgggacagggtgcccttccctcttaggtagccgaagcagagacagaaggcagcatacgtcagtgttttcttctatgcacttctaagatcaaagactttaagactttcactatttcttctaccgctatctactatgaacttcaaagaggaaccaggagtatgggaggagaatgaaagtgaaggaggagtgtaagcattgaagcacagcaccacagggaggggtttaggcctcgggatgactgcgggcaggcctggataatatccagccttccacaagaagctggtggagcagagtgttccctgactcctccaaggaaaggagactccctttcgtggtctgctaagtaacgggtgccttcccagacactggcgttaccacttgaccaaggacccctcaagcggccctgatgtgcgcgtgacagagggctcacctcttgccttctaggtcacttctcaccatgtcccttcagcacctgaccctatacctgccggttattcctagcttacattagtaatgcagcaaagagtaatattaaaagctaatgattaataatgtttataataatgattgataattgtccatgatcatctctacatctaatttgtattatgactattcttattctaactattttgtttattatactgaaacagtttgtgccttcagtctcttgcctgggcacctaggtaatcctccgcctacatatttcccggacctcaggagaatcacaaatacacaaataaatataagccctacaaaattcccagatcaggcccggcgggtggctcacgtctgtaatcccagcactttgggaggctgaggcgggtggatcacgaggttaggagatcgagaccatcctggccaacatggtgaaaccccgtctttactaaaaatacaaaaattagccgggcgtggtggagggcacctgtagttccagctactcatgaggctgaggcaggagaatcgcttgaacctgggaggcggaggttgtagtgagccgagatcgcgccacactgcactccagcctgggagacagagcgggactccgtctgaaaaaaaaaaaaaaaaaaaaaaaaaaaaaatatatatatatatatatatatatatatatatatatatatattccatgatcagccggcgcggaggctcacgcctgtagtcccaacactgggaggacaaggcgggaggatcgcttaagcccaggagttcaagaccagcctgggcaacacagcaagacctcgtctctatttaaaaaaaagttttaaagaaaattcgatgatcacagaacccgctatctgcatctacatccgcaaaagcaattggggagagataccgcaagggagggaagggttcccctggaaggggagaaggaaaggccagctggggcacacactgtcgttggatgaggaaaggcctccttttcatttctgcagcgtccactcttgagctccaacccactccatcgctgtcttcttaaaggacgcctcgcccacccttctctcccatcccatgcctgaatcccttctggaaggcatccgaaagaacagctatagaactctggggtgatacgttggttaactcgggaaagaactcaaggacactggactagaacgtggtgggattcctaggtcggtttcggggccatccccgccgcctatccttcgccctaggtcacctggaggtggctggaaggccagtggactccacatttagggagagtggttacaagaggactcggattcccccaccttcccttcggctttgggaatcccaggaaacccgccccgaacccctgaaaagtcccagagaaggtaagctgggcgtccagagtccctcccaggcgccgccgcagcgtcccgcccagcctcgcggggcacgccgggaggcggagttctcggtcgtgtcccgagagtggctggtccgcaggctcggactaccagtcccagaatgcactgcgcccgcagcccggggcgggccgtggttgcccctggcaacagagagggtctcccgggagcggggactgggaagcgctcccgagccggggaggcgcagagcccgaccagagagaggcggggacgcgggtagagcgaccaagaggtgtggaggccggaagagactgaccgcgccggcccttggagagacccctttcctgagagggggcgcacagagaggatgccgaagccagcgagatctagagagagggagacagggattgaatcacagagacacttagagggagggagagacctcaaagacagagagattcacagggccagagagacacgtagagtgggtcagagaagaggacagaggacagagacatagaaaagacaggagggagagagactgaatcacagagacacagggagagagggagagacctcagagatggagagagactcacagggccagatagacacatggagtgggtcagagaaggggacagagagagagacacagaaaagggaagagggagagagactgaatcacagagacacagagagggaagtctctatctagagaccctcgacagagattcctagagccagagacagagattcagagagccagagacacagagagattcatagagacatatagagagattcagagagcctgaatcacagagattcacagagccaacgagacaaacagagagattcatagagccagagacacagattcggagagtcagagagacatagaaagattcatagagccagagacacagagattcagagagtcagagagacatagagagacattcatagagccagagacacagagagattcatagacatatagagagattcagagagcctgaatcacagagattcacagagccaaagagacaaacagagagattcatagagccagagacacagagggattcggagagtcagagagacatagaaagagattcatagagccagagacacagagattcatagagacatagagattcatagagccagagacacagagattcagagagtcagagagacatagaaagacattcatagagccagagacacagagagattcagagtcagagaaacatagagattcatagagccagagacacagagagattcagagtcagagagacatagagagacattcatagagccggagacacagagagattcagagtcagagagacatagatttatagagccagagacacagattcagggagtcagagagacatagagagacattcatagagccggagacacagattcagagtcagagagacatagacattcatagagccagagacacagattcagagagtcagagagatgaatagattcagagagccagagacacagggagagtgaatcacagacacagagggacggggagatccccagaaacagaaagagattcatagagccagagagacaaatagagattgggtcagagagaaagggacagagacagagacagagaagagaagagggagagagattgggtcagagagaaagggacagagacagagaagagaagagggagagagagactgagtcatagacaggagagagacccccctagcatcagagagagagagagagatcaacagagccagagagggacaagtacagagaaacagatggaaccagagagatataggaagagacaaacaaaaacagagacggagttgcagaaccggaggaagggagagagacagagacaaaggcatttataaagacgggtggaggtgaggagagagagggagagacaggggcaagcatttagagagtgactcccagagaggaagacagagacggactcccaaagagatcaagttgcagagggagggggagacagagtcacagcctgagagagaatagagattcacagagccagagagacaaagacagggaaagaaacaaactcagggagacagaggcggaagaatttatcagacgtagagggagagacagagggagactgattcacagtgaggcagaccaagaccccgagaagaaccacgacaccaagacccagagatggcgacagatacagatggagacacacagcagaggaaatagagaaatagaaagaaatagaaacagcatttctcggagacagggaaaagaaaacagatccactgagaggcagaaacagagacacatcgagaaagctcgctccaggaatagagggagagggacagaggtcacaagaaagacacacgcaggcagagagctacacaaataatggagaggccaggggaggaaataaagactcagccggcatcggagaaagtgagaaccttagcgccctgcctgtccactgctggacccctagcgtggagcataaagtttgttgaaggaaggagaggggcagggtcagacacagggaccccagggcgcccacaggacacacgaggcaccctagtgggggaggaacgcggggcaggatgacagattgcagggtggtgggggggagccaggctcagaggatgcccctccctccagccagcccccggagtgggtgtgtgcacgtgtggggggcggggagggaggacatttgtcccgtgtctccgggaggggagcgcctttaagccgaaaccccgccctctcggtcgtcctggcaacgcctcccccaacccggggctcccacatttcagcaggtgccggagctggagctcccaccgccgccgcccgtgcctccggctgccggcgcccctgcctttggctcttcctccccactcgcccgctccccctggcggagccggcgcgcccggggtgccgctccctgcctggcgcgctccgcacctggaggtgccttgcccctctcctgcccacctcggaatttccctgtggctcctttgatccttcgagtctccagctcctctcccttccacctgtttcccccaagaaaggcaggatcctggtccctgctacgtttctggggccatggctggtctgggccccggcgtaggcgattcagaggggggaccccggcccctgttttgcagaaagggggccctgaggcagaaggtggtccacgaagtcaagagccacaagttcaccgctcgcttcttcaagcagcccaccttctgcagccactgcaccgacttcatctggtgagggaagggggctgggggactgggggacgaggggactaggggtgcagactcctatcacgccgacccctgtggaaggaagaaggagggggctgtagtcccgactcccaggttctaggatggccagggaacgctgggagcttcgactcctgggtttcagtgaggaggaggctggttcctggagtgctgggtccgagggaggaggaggctggaggacagaggtcctggagtcttgggtctgagggaggaagggcctggggggctgggagcctggattcctgggtctgaaggaggaagaaactgggggctgaactccagtctaagggaagaagggctgggggccaaaatttctgggttctagaaagaggaggtggccggggcttggacacctgggccctgcgggaggagggtcagagagcgcaggccccctgtggctcgcagaggttgggggtccaggtacccctttctgcactgacctaggatccctgactcttccaggggtatcggaaagcagggcctgcaatgtcaaggtaagagctggggaccggggctcctgggaccctcaggagggtggaggctggggccccacagctgaggctgcttgacacacgtgttctctggtccccagagaggcgcgggggagcccggggcggggggtgtggcagagacacagcctgtggtggggagggagctttgatggtggggccaccgcggaggtggtgctgggggcccctccctcggccggctccaggtggggacagatatttggagaatctgttgccatgggaacatggagatttggaaaaggggagctgaaggggggaagggggagggggctggagatgcaaagtcagagcccccccccaccccaggctgccgtcgccatgacaacaccagccgtcctaggcaggggcaggccgggtggggtcaccaatgggcgagtgggggccgggcggggccggcagttctggggggcgggagaggggggcgagtccttgagcaccagctgctactgctgagaacagagtgagtcagggtggggggcgggccggcagcagcgcccccagactcacttctgcccaagttgctgcttcctgggctgcgtctgaagatatttcggttttcgctctttgaatctgtctgcctctctcctggctttctgatctccgtccgtgggcctgtgtctgtttgtcaatgggatcctattttctttctctctttttccatctcccttccctgagctctgtgctctgtgtctctctgtaagtctctgcgtctctgtttctgactctgagcccatctcttgggtttctgtctcctgcttctctctctggcctccgattttctctctgttggactctctgtgttgagatccctctctttctggttttctcagtgtccgagttccgctctctctttccaattttctgtctgctggggtctcccgctggactaatccatgcctccgtctgtgtctctatgattttcatctatagtctgcagctttgtggttcatcgacgatgccacgaatttgtgaccttcgagtgtccaggcgctgggaagggcccccagacggacgtgagtgctcggacacctggttctcctcctcgggccgtgcccccgccctcaccccctcggcgtccgtcccaatttctcctgctatttttatggctgggaggggaggggggctggagagatagggggagctatctggcccagattccttgcccttggcctggaaagggggaatgcgagggggactgacaggctggggacacgggtggggcacagagaggaggccggggtgaggagactgaagatgggtgctgccgggggtgggctgtgatccaggggtgaagggatttaaaaattgagagctgaggggcacacggagaaaaatatcagtgcaggtgcggagatgccaacataagacagagggaatctcagggagaggaacagagacagaagaagacagagacctaggagagactgaagctgaggcagagagagagagagatggagcagagaaagaaccagggagaaagagaggaatttggaggcaccaaaagatggacagagaaactccaagagacggagacacagacacctggagaaagagactaaaatagaaaatggtggatacagacaacagcttaggagatgctgagaggagacccagggaagtcccacagtacacttgcacacatgtgcgtgcatgtacagatgcccctgtcatcacagatgtgcagcacgcagagacacacagcctctccccaccccctctctctccatcagaggctcacaagaccagtcaaccctgagtgcccattcccgttcccttttctgctttatctctgagcctcagtttcctcctctataaaatggggctgatgatctagcattgaccaacagaactgtttacagtgacggaagcattctgtacatgcactgtccaataggcagccaccagctccatgtagccagtgagcacttgaaacagggcgactgtggctgaggattagaaattccatttcgtgtcatttgaattggcttaaattttttttttttatttttattttttgagacggagtcgcgctctgttgcccaagctggagtgcagtggcgcagtctcagctcaatgcaacttccgtttcccaggttcaagcaattcttctacctcagcctcctgagtagctgggactacaggcgcatgccaccacaccccgctaattttttttgtatttttagtagagatggggtttcaccatgttggccaggctggtctcgaactcctgaccttgtgatccacccgcctcggcctcccaaagtgttgggattacaggcgtgagccaccgcgcccggcagaactgacttaaatttaaacagccacatgtagttagtggccaccaaatgggacagcacacatctggacacttccaggcttgttttgaagtcaggtgggttcagagtttcgcccagggtttgacacaagatcggagacagttttatgatgtacagatggagagagaggcagagagagagagatccacagaagtccatgaggcgttttaccaccctctcagctgaaaataacagaagtctacatagaagatgtgacttcatagaacatatattgagcaccactgtctaccagcacgtgtatgtgattgatgacccccctcgtccactcacctccgccaccaacaccagataagtctgatgcatccagtgctcattgggtacactcatcaagatttttttttttgttttttgcctgtaatcccagctactcgggaggctgaggcagaattgcttgaacctgagcggcagaggttgcagtgagccaagatcacgccactgcactccagcctgggtgacagagcaagactttgtcttggaaaaaaaaaaaaagatttttttttgtttttgttgttttgtttgattttggggtattttttagatggagtttcactctgtcacccaggctggagtgcactggtgcaatcttggttcactgcaacctctacctcccaggttcaagcgattctcatgcctcagcctcccgagtagctgggactagaacaggcatgagccaccatggccggctaatttttatatttttagtagacagggtttcatcatgctggccaagctggtcttgctcctgacctcacgtgatccacccacctcggcctcccaaagtgctgggattacaggcgtgagccaccgcacccagccgatttttggggttttttgagacagggtcccactctgtcacctagactggagtacagtgatgggatcatagctcactgcagccttgaattctccaggctcaagtgctcctcctgccccagcttctcaagtagctgggactataggcacaagccacaacacctagctaattaaaaaaaaatgtttttgtagagatggagtctcactcactatattgcccaggctggtcttcaactcctggtctcactcgattctcctgcctcagcctcccaaaatgatgggattacaggcgtgagccactgcacctggcctcaagtattttgtatacagtataggttggatccacacaacagcttatttggttatttttccctgtctatctggtttgaatcccagctccaccactttttggttctgtgacatttcctgagttaatttacctctctgcacttgttgaattccttgtttgtaaagtggagatgataattatgctcactatggattgttttgaagatttagtgagtcagacatttgggatggtttctgacacatagcaagagccaaaatattattttttattcttgttaaaattattattatgaccaatgaggaaacgagtgaatagtgagaaggagatctttcctctgcatcactcgggggtttttttgtttttgtttttttttgctgttgagacagggtctcactctgttgcccaggctggagtgcaatagtgctatcactgctcactgcagtcttgacctccggggctcaagtgattcactgctggcagttgatcttcttaaaagtaacatgcaggccaggcacagtggctcacgcctgtaatcccaacactttgggagaccgaggcgggtggatcacctgaggttgggagttcgagaccagcctgaccaacatggagaagccacgtgtctactaagaatacaaaattagctgggcgtggtggcacacgcctgtaatcccagctactcaggaggctgaggcaggagaatcacttgaacccaggaggcggaggttgcagtgagccaagattgcgccattgcactccagcctgggcagcaagaacaaaactctgtctcaaaaaaaaaaaaaaaaaaaaaaaaaaaaaaaaaaaaaaggtaacatgccttgaccaggcatggtggctcatgcctgtaatcccagctctttgggaggctgaggcaagcggatcacgaggtcaggagatccaaaccatcctggctaacgcggtgaaaccccgtctctactaaaaatacaaaaaattagccaggcacggtggcacgcgcctgtagtcccagctactcgggaggctgaggcaggagtatcgcttgaaccccggaggcagaggttgcagtgagccgagatcacaccactgcactctagcctgggcgacagagtgagactccatctcaaaaaaaaaaaaaaaaaaaaagtaacatggatcaagatttggcaagaatgatttcatttagtccccagggagggcacatgcccccacttttcaagcggtaaatctgaggctttgaaaaggggcaggcgtggtgaggccacctagctgggtaggggatagaggcaagatttgaactctgatgtatgtaaccacagcctccgtgctgtctcctttttaacagcgacgttcacttttgagaataagaacagcagcctctgtctgtggatggtttgtgtgtcaggcagcctgctgagaaccttcacacacagcatcttatttagtgcggcaggaaccctttgagttagggtcagcggagatatttagaagcccagcacattgaaaaggatcctggaaactgccaacaccctcctctacccaaatatatattcaaactagaaaccccactaacatagatgaaaatccaagaatggcctaaatgttcaccctgtgataatccttttaatggattcttagaatcaagttatttaacaagcagatattgtcccgggggtagtgggtggcaggggagaaggagaagcttcactgatgacctgcattcttgcttaatggactctggaaatttagcattgcttcaaaatatagattatttatttccacttgacagaggaggatgctgaggctcaaaactgggaatgaacttgccccaaatcacacagctgagaagcggcctagctcttacttacattcagggctatgtagggacttcaataaaatccctaacaataaccacagtaatagtattgggagcatctaacgtggtaggcacagctatgttttgtacaccaattattttatttaggcctcctgggttcctattataactgagaggtcatgttctccattccacctggagctcagagaaggcataccatatggacactgacagaagctgccagtgaaggagctggggttcagggtggcccacaagtcctcaaataataacttgtgggagttggggggatgggaactatgggaggttggaagctcctgcctccttcatgttctgcccagatatcatttggtcagcgaggcccccctgccactccccctgcacacagttttgttgttgttgttgttgtttgagacagaatcttgctctgtcatccaggctggagtgcagtggcacaatcttggctcactgcaacctcggcctcctggattcaagcaattctcatgcctcagcctcctgagtagctgggattacaggcatgcaccaccatgtccggctaatttttgtatttttagtagagacagagttttgccatgttgcctagcctggtccggaactcctgagctcaaggcaatccgcccacctcggcctcccaaagtgctgggattacaggcatgagccaccgcacccagccaggaccaccgtatttaaaatttcaatcccccaacttctggtggtccccatccctgcctcattttttctccagagcacccattaccaaccatcaaactatatgttttatttatttaccatgtttacattctgtatccctccattaggaagtaaactccatgtgacaaagaggtttttttttttcatttgtttaatgctgggtccccacaccaagaacagtccctggcacacagcaggtgctcaatgattattggtacatagagtgaaagagatggagcctcaggctgacctagagagcaaggcaggaggaaaagataaaagggcccctcccctggggttttaggaccctcccaacgccccctaagccagtcttctctgcccccaggacccccggaacaaacacaagttccgcctgcatagctacagcagccccaccttctgcgaccactgtggctccctcctctacgggcttgtgcaccagggcatgaaatgctcctgtgagtgacctgggccttgccagggcccttccaaagcgcccggtctgggttccgggaaatgcccgggatggggtggggggtggagtcttggcttgggggcggggcctgaggtgctacccgcagctttcccctccaggctgcgagatgaacgtgcaccggcgctgtgtgcgtagcgtgccctccctgtgcggtgtggaccacaccgagcgccgcgggcgcctgcagctggagatccgggctcccacagcagatgagatccacgtaactggtgaggccccgccccctcgcctggccccgccccctccccaagtgtgaggcggggctgacccaaggcacttgtgctggcccagccctaccccaaagatggggccacgcctctttctatggtcacgcccacactcctgaccccaccccaaaggccgagcacacccagccataccccttttggctcgaagccccgcctccaacctggcttcttgcaactttctgcacctgttaatgactttgactttctttttttttttgggacggagtttcgctcttgttgctcaagctggagtgcaatggcgcgatctcggctcactgcaacttccgcctcccgggttcaagtgattctcctgcctcagcctcccgagtagctgggattacaggcgcgtgtcaccaagcccggctaattttttgtatttttagtacaaacggggtttcaccatgttagccaggctggtctcgaactcctgaccccaggtgatcccctcgactcggcctcccaaagtgctgggattaacaggcgtgagccaccgcgcctggccaatggctttcttttttgtttttattttatgtttatttttttgagatggagtcttgctctgtcacccaggctggagtgcagtggtgcaatcttggctcactgcaatctctgcctccggggttcaagggattctcctgcctcagcctcccgagtagctggaattacaggcgcctgccaccacatccggctaatttttttttttttttttttttgagacaagatctcgctctgttgcccaggctggagtgcagtagcatgatctcagctcactgcaacctccgcctctcaggttcaagcgattctcctgcttcagcctcctgagtagctgggactacaggtgcatgacactgcacccagctcatttttgtatttttagtagagacagggtttcaccatgctagccaggctggtctggaactcctgacctcaggtgatccgcccgcctccgcctcccaaagtgctgggattacaggggtgaggaccgtgcccggcaatggctttctgggtataaggatcttgagaagggagagtacctggttctgagggaggctgtggttcagtactggtgacatggccagggtccaaactctggttcctaatggagagaagggctctggatctgatttcagggtcactggttgcggaaagggctctatgccctgtcttctgggttctggagaggtaagaagtcatgagaaacgagactgagagcttggaattcttttttttttttttttgagacggagtctcgctgtgacgcccaggctggagtgcagtggcgtaatctcggctcactgcaagctccgactcctgggttcacgtcattctcccgcctcagcctcctgagtagctgggaccacagacacctgccaccacgcccagctaatttttttttttttttgtatttttagtggagacggggtttcaccattcacaggatggtctcgatctcctgaccttgtgatccgcccgccttggcctcccaaagtgctgggattacaggcatgagccgccgtgcctggccaagcttggaactcttgattgctgactggaggagggctgggagccccttcctggatctctaacccgtcacactcttcctcactccccgtttagttggcgaggcccgtaacctaattcctatggaccccaatggtctctctgatccctatgtgaaactgaagctcatcccagaccctcggaacctgacgaaacagaagacccgaacggtgaaagccacgctaaaccctgtgtggaatgagacctttgtgttgtgagtctggggtgcagggaaggcaatgacagctgacagagaatgatctgagggtcctagtggcccccagagagcagctgatgggaggggttaggatagagggaacccagaaaagggcagaagaagatggtgggaaaagggaatagagtgattgagggagtgggatggagatacagaaacggagagacagccagaccactgtataattagtctccattgaagcccccaactttagagttagacagagatgagagagagaagagagagtctcagaagaggcagaaacccaaagagagacacagatggagagggaggggagaagatgggggatggcagggagacagagatcagttgacaggaagacagagtgatagagacccagagaggagagaagggtacagagactcagagagagagatctcgagagacaagagacagagatgggaaggggcggagaatgcaggaggaagggagaggaagagctctctaggtttacttcaggccccaaagccctagctggagagagagcccggctgggaaggtcagaggtcggagaccgacaaagcaggagaggagccccagctggctgggtttgcccccacctccagcaccaaggatggggaaccgaggggagccatgagctcggctctgcaccccatccaccccaccttcctgcagcaacctgaagccaggggatgtggagcgccggctcagcgtggaggtgtgggactgggaccggacctcccgcaacgacttcatgggggccatgtcctttggcgtctcggagctgctcaaggcgcccgtggatggctggtgaggagcagggctggggcctggggatggagcgcaatattaccatctccatctgtgtgtggtctctctcctccaggccactgtccttccctctgcctcccagcatgcgcacacacacacacacacacacacacacacgcacacacacgcacacacccctctctctctattcttctcttcttctcccctccctttctccctctccctctctttttatctcactctttctctcttccatctctgtgtccgtctctctgtgtctctttcctcccttccaatgtctttgcctctcccatgggtgccccatccccgctgcccgcctctggtctccgtctgtatgtcaggtacaagttactgaaccaggaggagggcgagtattacaatgtgccggtggccgatgctgacaactgcagcctcctccagaagtttgaggtacccagaccctggcttcctcaagggagcccagcccagcctcccacggttcagagctggcctttccttccacccctgagtgcccgctggtcctgggactacagttcccagaagaccctaggactccctcctctgctcttctaggggactcgagccccagggtctgatgggaattatagttcctatctatcgccatggcttgagggtactaggggccaccagcccctgttctagggcgatcccctgcatctcttgggaccctgactctctctttcttttctcccaggcttgtaactaccccctggaattgtatgaggtgagtagaaccagggcgttgaatggaggcagtttttgcctacttctctgatttcttattcctcctctgacttctgtcttcaattccccacacatgagttgagcacacatttgtgctaggcctgtcttgtgcttgctgaataatccaggatccagagatgaatctgaccctcaagcaactctccaaggtagggacacagtcacagatacttaaaatacaggaagatgtgctaaattagaggtagcccagggcactgaagaggcctaacggaggcactaatccagcctgggggagggtggtcagggaggacttccctgaggaggtgacgcctgaattgattcttgaggttttttaaaattttttaatttatttttatttttatttttatttttatttctgtcgcccaggctggagtgcaatggcacaatctcgcctcactgcaacctccagctcccgggttcaagcaattctcttgcctcagcctcctgagtagctgggattacaggtgaccgccaccacacccagctaattttttttttatttttagtagagatgggatttcgccatgttggccaggctgatctcaaactcccaaactcaggtgatccgcctgccttggcctcccaaagtgctgggattacaggcatgagccactgcgcccgaccgattcttgagttttttattttttttttgagacggagtctcgctgtgacgcccaggctggagtgcagtggtgcgatctcggctcactgcaagctccgcctcctgggttcacgccattctcctgcatcagcctcctgagtagctgggactacaggcgcccaccaccatgcccggctaattttttgtatttttagtagagatggggtttcaccgtgttagccaggatggtctcgatctcctgacctggtgatccacccgcctcagcctcccaaagtgctgggattacaggcgtgagccaccacacccagccgattcttgagttttaaaaaatctatcaagcatgatcatcttaatctctccattcattcattcactcactgaatatccttctttttctttctttctttctttctttttttttttgagacagaatctccttttgtcacccaggttggagtgcagtgatgcagtctcagctcactgcaacctctgcctcccagattcaagtgattctcctgcctcagcctcctgagtagttgggattacaggagcgcaccaccacacctggctaatttttgtatttttagtagagatggggtttcgacatgttggccaggctggtctcgaactcctgacctcaagtgatccacccgccttggcctcccaaagcgctgagattagaggcgtgagcgaccacgcccagacgaatacccattttctagggtgtcataagccaggccctgttctgggaatagaatcaggccattccctggtggagctcttcttctagtggaggacaaagttacaaacccagacattcacaacgaggagcaatgctgctgtaatggagacagcctcaggcactggggcgtccctggcacagcctgagtcagagaaagcttcctagagaggtgagacctggtagaagggcgggatttcccaaaggagagaccagattttcaggcaggaggaagtaatgctctctccctcatttaccctttcaaaaaatactttacagagcatctttgtgtgccaggcgtggctctactcactggggatatagagaaagcagggaaagaacaaacaaacaaacaaaaaagttcctttccttatgggatttacaccgggaggaagacattaaacaaaatatataagcatatgatagactgggcacgatgcctcatgtctgtgatcctagtaaggcgggcggatcacctgaggtcaggagtttgagaccagcctggccagcgtggcaaaaccccatctctactaaaaaatacaaaaatcagctgggcatggtggaggcgcctgtaatcccagctactcggaaggctgaggcaggagaattgctggattccgggaagtagaggctgcagtgagcccagatcgctccactgcactccagcctggatgacagagggagactctgtctcaaaaaaaaaaaaaaaaaaaaagaagacaagaatcttcaagattcaacaacagcaacaacatgttatagtctttactggactcttacagaaactttcaccagagtttttaatgttgtgtgtgggggttcacctgcatcagaattcctagagtgcttgcttttaaaagcacattccccagcctttctgcagacctactcagtgacgatctctctgatgcctcaaatgtctgcctactaaattaattcctcaggtgatccttttgcaaagttaagtttgagaatgggctctgcggccgggcgcagtggctcacgcctgtcatcccagcactttgggaggccaaggcgggtggatcacgaggtcaggagatcgagaccatcctggctaacacggtgaatccccgtctctactaaaaatacaaaaaaattagctgggcgtggtggtgggtgcctgtagtcccaggtactcaggaggctgaggcaggagaatggcatgaacctgggaggtggagcttgcaatgagccgagatcgtgccactgcactacagcctgggtgacagagcgagactctatctcagaaaaaaaaaaaaaagagagaatgggctctgcaggagacaagggtaccagcgggaggacattctgagccaaagaggtagagtcttttgagatcagcagggatgatcctcccgtacaaacccaagaaacccagcagggcagatggtgggcaaaggcctagaggcagggagtgtagggtggtgtgtgtgcctgttgtggctcacagcactctcccacagttcagcaggcaccacttaatattaccaatgaacaccaactctgtgccaagccttgagctaggtacggggctaacaacacagcaaacagaaacagccctgattattattattattattattattattattattattattattattatgtatttatctatttgagacacagtctcgctctgtcgcccaggctggaatgcagtggagcgatctcagctcactgcaacctctgcctcccgggttcaagcgattctcctgccttggcctcccaagtagctgggactacaggcatgtgccaccatgtcctactaatttttatattgctagtagagatggggcttcgccatgttggccaggctggtcttgaactcctgacctcaggtgatctgcccacctcggcctcccaaagtgctgggattacaggcatgagccaccgcacccagccctcaacaaatatttatgtagcctcaatgaggtaggcagtgttactgtgtcttagcgaacaaagcagacccctgccttagggagctcacaggcagaaagcagatagtcacacagatagatgtaaattactaagaataaaagtgccaggaaggtgctgtccatggtgaccaaggggtggtaagagaggcatctgacccagtttaaaaagtcaggcgaggcctctatgaagtgatgcttgagtcaaggtctaaagggtgtttgggagacaactaggagggaaggggaggggagagctttacaggaagacctaacggcacatccagaggccctgaggtgggagggaggacaatgagtgtcaggccagggtggctggaccatggagcctgggagagagaagaacaacctgcagtgtcagtctcagcctggctctgcaagtcatgtggaataaaatcttaacacagagggagcagttaaagggtttacaagcataggggagacatgacctggtttatttatttttaaattggctcctgtgcctgctgagtagagaatgcattagaaagggcagccgtccatgtagagggacaagtgtggaagctgtgacagcagcttagtcttgggccccctccctggggggccgaggcaggaaaaggtagagaagggaccctagctgaaagccaggtgtgctccctggactggcagcacccatgtcacccagaagctttttacacataacgattctcaggtcccaccccagatttatagagttagaaaatctggcagtgggacccagcaatctgttttaccaaaccctctagggaattccggcttagaggctaagagcaaccagattctagagctggactgcttgggtttcatttctggctctgtcctttacctgctgtgtgacttggggcaagttacttaacgtctctgtgctagtctcctcttctgtaaaatggaaacgatagcagggttttctggaaacagcatatgataagctatctaaaaaaaaaaaagaagaaaaaaagagctaagtgtttgttgaataataaataaaccctccaggctatggggagtcagagaaaattaagccaaggacagggtaggagggtggccattttcctctgtctagcgattctcatcctttcctttcttgggtgctgtgtctcttgggagcatttccttatcgctgtgtaaggtctaactgcctctggctctttctttctcctttccacagcgggtgcggatgggcccctcttcctctcccatcccctccccttcccctagtcccaccgaccccaagcgctgcttcttcggggcgagtccaggacgcctgcacatctccgacttcagcttcctcatggttctaggaaaaggcagttttgggaaggttggattcctggggttctgggggaaagggaggatgtctgtgggaaggtcagatttctggttcttagggaggaagtgggggtgggaagagactgggctcctgcatcttcaaatatggttaggttgggccgttcaggttcctggagaggagaggtttacagatgtggacactctccttgaggggacgggcggcaagtcagggctgtcagtcccttaagagatggaggaagggcctgggatcccgtttccctgcgtcccttagggagggggcaggtcctgtaccactgggttcccaacatggactggcccttttggaactgtgcgcataggtgatgctggccgagcgcaggggctctgatgagctctacgccatcaagatcttgaaaaaggacgtgatcgtccaggacgacgatgtggactgcacgctggtggagaaacgtgtgctggcgctggggggccggggtcctggcggccggccccacttcctcacccagctccactccaccttccagaccccggtaaggatggagggggcggaggctgtcctccgggccctgccttatccagttctggacatctgcgttgggattctgagtttagggcgaggcaagagaactttgtgctctctgagtgggcgaggccaggcggattgtctcctcagggggcgtggccgggggggggtccttggggggcgtggccaggcgaagggactcatcggggggcgtggccaggcggaggggctcaacggaggcgaggccgggtggaggggctcctcgggggcgtggccaggtggagggactcatcgggggcgtggccaggcagaggggctcttcgcggggcgtggtcaggcggatgaaatctttgggggggtggtttagaggggcgggctttgtcaggcgatgggatcattaataggcgtggccaggcagattggctccttgggggcgaggccaggcagacgagattatgaatgagcgtatccaggcaggtagattcttcggagggcgtggtcgggcggatgagctcctcgggggcgtggccaggcggtgagttcctcggtggcatggcctggccaggtgaatgggtcctgcggaggtgtcgtgaagcggttgagttccttgggggcgtggccaggtggatgggctcttggggggagtggccagatgcctgtttccctggggagcttggtcttgagtggctgtagccagtgctctggaattttcagcaaaggggcacagtggaggagggtgccttcctagtgggcctgcccagaattgggctccgagtgacggggtcatcacttttggattctgactgaaggacacatcagaaacaggacattatttccttaggattgcgacttaggggcagagagtcagaacctgcaagattttaagagggcgtgactttacttccaggggctccgaatgagagtggccagccacctggattaaaatatatgtatgagcaactttgattcctttttttttttttgagaaggagttagctcttgtcccccaggctggagtgcaatggcgcgatctcggctcactgcaacctccgcctcccgggtttaagcaattctcccgtctcagcctcctgagtagctgggattacaggctcccgccaccacactcagctgatttttgtatttttagtagagaccgggtttcgccacgttggccaggctggtctggaactcctgacctcaggtgatccacccgcttcggcctcccaaagtgctgggattacaggcgtgagccaccacgcccagctgcaactttgattcttagtaggaagccagaattgcatctgtgtgtgagtggctgtggaaagagattttggtgttcccggatttcgagcgaatggtgggcttcagtcttcaattctgagaaggcggggccagaacacgtggtctgatagttggcggtggtctggcgggtggagattctgaggtagcaggattagcaccttagggccctcccagggatgtggctaggtgctctgaatttctggttgggtgcatctggaaccttccacgtctgtcctgagtgatcaggaaagaaattctcctactctgggtagatggatcccgcctctaagcccatgcacttctccgcaggaccgcctgtatttcgtgatggagtacgtcaccgggggagacttgatgtaccacattcaacagctgggcaagtttaaggagccccatgcagcgtgagtctcggccaacagagaatggtcggggtggtggaagggggcaggatccagccactgaccttctgacgtccccacccaccccgtcctccaggttctacgcggcagaaatcgctatcggcctcttcttccttcacaatcagggcatcatctacaggtgagcagccccaggaatttccgtggaggaaatcacgcccctggaagggaagggatttgaatatgtggctctagactgctgaactcaacacttcttgcaattcctgccccacacccctgcatcgtccagggacctgaagctggacaatgtgatgctggatgctgagggacacatcaagatcactgactttggcatgtgtaaggagaacgtcttccccgggacgacaacccgcaccttctgcgggaccccggactacatagccccggaggtaaccccaaccctgctgctctggtcacgctttgagatcccttagagggtgtagctgatggtccagtattcaccacgggtgaggcctgaccctcagaccttgtcatgagttgtggccttcttacacagccagtcgttcctccagcctccagcacaggtgagcttggcactgagcctgccaggtgggcccagctgggtctctaaataggtaaggtgggcagcacctgtgggtgaatgttccaggagagtgggaccagctcgtaggaattccaagtaggacctgaccctggatccttctgagaaggggcagacgatttctagtgtactctgagtgggtgtggcctgtcccctgccaacactgaacatgtccggactatcttctgaatactttaaactgggcagggctctccctggagtattcagttggatggaagcttatttcctgtgttgtacgtgtttctctgatgtaagtgtactggacttctgtgctgcatttttcaagagggcaggatcagctgggcgcggtggctcacacctgtaatcccagcactttgggaggctgaggcaggtggatcacttgaggtcaggagtttgagaccagcctggccaacatggtgaaacctcatctctaacaaaattacacaaattagccgggcgtggtggcatgcgcctgtaatcccagctattcgggaggctgaggcaggagaatcgcttgaaccggggaggcggaggttgcagtgagctgagatcacaccactgcactccagcctgggtgacagagcataacttcataacttcatctcaaaaaaaaaaaaaaaaaaaagccgggtgcagtggctcacacctgtaattccagcacttgggaggctgaggcgggcggatcacaaggtcaggagtttgagaccagcctgactaacatggtgaaactccatctctactaaaaatacaaaaattagccaggcgtggtggcgggtgcctgtagtcccagctacttgggaggctgaggcaggagaattacttgaacccgggaggtggaggttgcagtgagctgagatcgcgccactgcactccagtctgggcaacagagtgagaccctgtctcaaaaaaaaaaaaaaaaagaaaaagaaaaagggcagggtgagatccctaaggttctgggagagcagatgctgtcctatgagtattttaagtgggtggggtattacccgactttgttaaaggggtggggctgatgttctgaatgtacgtatagatggataaagcacatgcctgtagtcccagctacttgggaggatgtgcctgactcgtgcccaaataatcaatgtcagtgatcacaaaacctggctggtaatcagaatcatctgtagaaaatttgaaaactgaggccagacatggtggctcatgcctgtaatcccagcactttgggaagctgaggcaggcagatcacttgaggtcaggaattcaagaccagcctagccaacatggtgaaaccccgtctctactaaaaatacaaaaattagctggacatggtgatgtgtgcctgtcaacccagctactcaggaggctgaggcaggagaatcacttgaacccaggaggtggaggttgcagtgagccaagattgcaccactgcactgcatcctgggctacagagtgagactccatctcaaaaaagaaaaaagataagaaaatttgaaaactacacacatattcctgactctgacacaaatattctaggtgggtggaaccagtgacttggccgttaggtagtctttctatttgaggccaaatgaatgtttgaagtaggtatgctttgtttccagaatattccaaaagttagatcgctggccaaaatattcagagtggaggctgggcgtggtggctcactcctataatcccagcactttgggaggcggaggcaggccaattgcttgagtccgggagtttgagaccagcctgggcaacatagtgaggacctatcttcactaaaagtgcaaaaattagccaggtgtggtggtgcacacctgtagcccacctacttgggaggctgaggtagaagaattacctgagcctgggaagttgaggctgagtgagccgtgatcacactactgtgctccagcctgggcaacagagtgagaccctgtcaaaaaaaaaaaaaaaaaaaaaaaaaacgaaacaaaaaatcacctgatgaaataaatattcagagtgggaagagcttgtgctgaaagcacttaacgtgggtagcgctcccagggggtgaggccagaggggtcctaggcttcctaaagaacgcatcatgattccctgccttccacctcccctagatcattgcctaccagccctatgggaagtctgtcgattggtggtcctttggagttctgctgtatgagatgttggcaggacaggtaagggaaggtggggagaagctggcttggctaaaagagacagagaggggcacctggatctcaggaggagccagttagaaaggagcccagaaggttgtgctcgaatagcgctgtccatggttctgaagtgttgtcttaatgtagaccaggtgttttgttttgttttgttttgtttgttctgttaccatggattctttctccctagatggtaaagtagcagtctggttaagcctatggatcccttctcagaagaatgtttttcaatgcacaaaatagaataatacatacgcagaaaaccaaggttcaaatcctcactttgccacttactggctgtgtcagcttagacaattacatacattctaaatcagcttgattggattcctggactgctgagtgtactacaactaaaaaaattggttaccacactcttgatcatcttcttagctggctatggtagtgggcacctatagtcccagctactggggaggctgaggcaggagggtcacatgagcccaagaactcaaggttacactgaactatgagtatgccactgtgttccagcacaggcgacagagcaagaccccatctcaaaagaacaaacaaacaaaagaaatcaatcattttgaaagatagtcaccaaaacttttaaaatttaattgaatctaacaaccaactaaattcaatgtatacagttgtctaaatatttaaaattggaaaatggacatatgtgcaatttcttattaattcattaagtagtaagttctaatggtagtaaagtaaaaaggagctctaacagtaattttgatgtagcaatgactaataatttggaatatctgcaactctcatgtgatgagaaaatacctgtgattactattgataatgaagccacaagcactgctgctgcctgcattcataactgaagggaatgctaaattttagttagaagttaaaaaaaaatttggccggacatggtggctcacgcctgtaatccaagcactttgggaggccgaagtgggcagatcacttgaggtcaggagtttgagaccagcctggccaatatgatgaaaccccatctctaaatctttgccttggtatcattttttgtaacctcagaagactgtgaactactcatccaaccaggagaatgcttttagggtgtttcctgcagtttttcctctcttctatttaactgacatgttgcataattaacagcctgctgatttacatagcagataaagagaggcagaatagtacagagatgcacagatctgaggcatccgagataggaaatgagagaacctgagaaggagagagatcaagctttggtggtttggtctgatctctcctgagggtgtggtcaggtgtgcatgtggggcgtgtgatgggtcaggcatgttcccggtggggtgaggagggtgtggaaggtttggggaaaggcagttgggcatgtccctgactctctatcccctccactttgatagcctcccttcgatggggaggacgaggaggagctgtttcaggccatcatggaacaaactgtcacctaccccaagtcgctttcccgggaagccgtggccatctgcaagggggtgagagccccctgactcccagcttctccaggctcacaaccacacaccccattgctgtctctgtgcctattagaaaaatgctcccattcctgaagtcactttacttccatctgttggaaaagttgatatgatgcataggttttgttagaacaatgatttccagccctgttgccacgaggcctggagatggcctctgtctcatccttctctgtgactcccactccccagctccctgcttgcaggaagtgctgaaagtccagggtgtctgtctgtctagaactgggtgggtcaggtaaacccaacttctgcagcttttcttcctgtgtgaacttgggtgagtcaccaaaactttgtgagcttaactctcttcaggggttatggagttgacacagaagaaagcacctggcccatagcagattttcagcccatgtcagcaccttctgcgtctagctgctctctctgcatctccctgacagtctctctggtttctgtctcatgcctcccctccatctgcatacgatggggctctctgtgtttcttccttttctctgtgtctccttctgcatctctgtctacacttttgggcctttgtccaacccccctaccccccatctctgtcccctcctgtgtccactctcatacacacacgctacatctcaccctcctctcctgctggctttctgtcctcccttttctctgggtctctgtccccatatttggtctttattcctccctctgggtgtgtgtttcctgggtctctatccttctctctttctgaatctctgtccccctgggtctcctctgtctcctcccttctctgagtttctgccttcttacctggggtctctgtaccaccctctgaatttctatttccccttttctctgggtctgcaacctctcttcccccattccctccctcttccccttcatctcctctacccttccctccctccccctaccgacctccctctgtccttcactctccccttccctccctccccctacccttccctctccccgtccctctctccccttccctctctccccctaccccttttccctctcctcttctccatctccctcatgatttgttctgtttctctgtgtgtccctgggtctctgggtatgaatttcatctgctatcattttcatgtatcctctccttcttcctgtctctctctctctctctctcactcactctcaccctctgtctctctctctctctgtccctcttcctctctctctcctctctgtctctctctgtctcgctctctgtctgtctccctcctcctcctcctccctcctcctcctcctcctcctcctcctcctcctcctcctcctccttcttcttcttcttcttcttcttcttcttcttcttttcttctctctctctctcctttcttttcccttcctccctccatttgcctgtttcccctggctgttcttatctctccggatctcatgcctgtgtctcttggttcctccatctgcctgtctctgtccctctttctctgggtctacctgtccggcactctgtctgtttgtctgtctgtctctctctgtgtttcccacagttcctgaccaagcacccagggaagcgcctgggctcagggcctgatggggaacctaccatccgtgcacatggctttttccgctggattgactgggagcggctggaacgattggagatcccgcctcctttcagaccccgcccggtcagtcaccctccaggcaacaaaaacctggtccctgaaggggtggggttcccctgggcctcaatatacctgtatgtgggggtggggttccctctgcagagccccccgcccccaacaaaaggaggtgcagacaccatgaagcatgaatagagattctgcaggagacaggagatgagactggggtacacagagggacacccgaggagccctcggagctgcttaactttccctcccccacgtctcccacagtgtggccgcagcggcgagaactttgacaagttcttcacgcgggcggcgccagcgctgacccctccagaccgcctagtcctggccagcatcgaccaggccgatttccagggcttcacctacgtgaaccccgacttcgtgcacccggatgcccgcagccccaccagcccagtgcctgtgcccgtcatgtaatctcacccgccgccactaggtgtccccaacgtcccctccgccgtgccggcggcagccccacttcacccccaacttcaccaccccctgtcccattctagatcctgcaccccagcattccagctctgcccccgcgggttctagacgcccctcccaagcgttcctggccttctgaactccatacagcctctacagccgtcccgcgttcaagacttgagcggagcccgatattctccctgaccttagcgttctggactctgccccaatcgggtccagagaccacaccactaaccatccccaactccatggggttcgagactccatcttggtagttctgtgcctccccccagaccccgcccctggggaaatagcctcacggggttggctgttccagactcaggttccagaacagccctcggcctccgaggctccccgcctccactctagttctagatgagtgggaggcgtgcccccctcctccagtacgtcccgctgctgtgctctggggatttctgggatatatggaggattctttccccagaggctcccaatcagcttttgttctagacttccccatcccgaagccatcacttctccccgcagcccgcctgccgtgcatggctcctgtctggctcggacccaccccaactctccccagtgcctgccactctctgggactctcctcctcccctcctcttcccttagcctctcccacccggccacagctgctggagaataaatttgggatgctgatgctgaagtgtttggatattttcttgtaagcttggagaatgaacggggtgtggaggcgggacagtgactgtacatagacacaaacagagaaggaaagcacggagacccacaaagtgagaggggagacacccactgcaggggagcaagcagagaagcgcgcgcagacagaggcaggagacccagacagacagagacagggagagaaaatatcacagagggcaccaacgtggacagtgcacagcgagagaggggcacggagatcactgagagtgccaggtggcgacccccgcgcagagacccagcgcgtccgtgttcaccagagcagccacgcaagctcacatgcacccccaggctcagacaccggggagaagtccttcccaagcggggagatcacagtctggcctcttcttgagagacctagagacctgatcagaggaagagacccccacgccagagcaaccaaaaacagccagaacccgagagcctaggaatcggcgacggaggcacacggcaggcagacgcgccttctgggcctctttcccttgacccacttgagagtctggggagtgccggggaccgtgcagatggactacatttccccgcaggcctcgcggcagacccttcccccaagtgcggctccttgccgccagggctgatgggaaatgtagtctccggtcagggccagaccagtggagcggtgtgccttgtctgtgtgtttggaggggactgagccccaaagcttcgcagtcttccttgcggacccgggcacgtcttcttccctgcagtctcctgggtttccatgacccggtccgggtggatgctggggctgcccctctctccctcatcaccgccgcgacacccccatccagtgcccgcaggccccagcccccgctccgaccctcggcgggcggcctgcccctttaagagtggccccgctgacatcacggcggggggggggggtggcccggctcctggctccgcggcggctgcaggacccgactccgctctgcgcccgcccgctgctgtagggaccccggcccgggacgccccctcccgcttcctgcagccgtccagaccccaggctccgccccaggcctggctagagccccagtcctcgtcaggggacccccaggattgtccctgctgtctctccttctcagagtctctctctgtctctctctgtctctctgtctctctctctctgcctctgtctctgtctcttctccaagctcaaggtctctgggtctcagcatctctcagccccaggcctctgggcgtccccctgtctctttctgtctcttcctggtctctgacctctccacttcccaggcctcagaatctctgcgcctaggtggtgaggggtggtcttaaactctgtctctctccctctttgtctctctctgtctctgtgtctccttcagtctccagacctgagtccctggatttctcggcctcaaggtctcggcgtgactttctctctctgccctgtctctctttgtgcctctgcccctctcgggctctctgcctctgtttctattctctctccctctctgcctcccccatcctcaaggcccatctccctccctcgctgcatccttccccccttccctccccgcccctcccctcctccgcagtagccaatgagcggccgccggttcctgctcccggctccgtccgccgagtgaggccgcggccgcggggggtggggggtgggaggccgggagggggccgggacgccgggctccggggcgggggcggggggcgcgggcaccggcgaccccggtggcggcggcggcggccgggggaagcctcggggccggtcatgcggctgcggggcccgcggcccggagcgtccgcccagccctgagcgaggtgagcgctagcggagggtcctgggaggaagaaggggcgcccctcgaggtggctgcgagccgggtttggggcaacaagggacccgagtggctccaggggtggtgagatcctggcggtcgggacgcccgaattcgagcggctatgggggatgcagggacacctgggcctggcgatcccggaggacggggtccgagggtcccggagtgggaaactgcactcctcgcgtccgagtcgcagcgagcgtgggctggggagggcagaggccgggtccctgaggaaggcgaggtacggggcgagggcggaggacccaggcccggccagagcaggatgtgggtctggaaaggggtcccagaaagggggagttacggtctcccgagagatggaggagagatggagtttgggcttaagacttgcagaaggggaccccggagattcaaatgcctgaatccgggaaagggtgggagaaagagggagaagaggaggcttcaggcctggggggagggtcccaaaggaggaaaggctggaggaataaggagatctgggcgggccagtgagagggaggaggaattggagcaaggttgggttttaaaacggggtgcgagaatgtggagaagggacgaggtcccagctgagagtcagaggggcgaaagggggaagctgagatcggctacctgggatggaggcagccagggtggccagggtgatggtgcccgtttccgagcccacagggctgcgaggggaccaggcagctcgcggtcaaacccctgagccgccaggcgggggatgggaggaaaagctggccagagcgttccctgactccggatctcggaggcctccaagaggttgggggggaaggaggggggatctggaggctgggagtgcggggtggagcggggaggagtgagggttgtctcagactccagagtctttattcaggtggagcagagttgcaaggttagaagaattctggtgaaggaaagtggagttttatgtcttgattagtttgtaggggagaatgttgaggggtctcaaccttcatagttaaaaagatcccgggtattcagggatgtagaggtctctggttgataaaggctaagggtcccaagttgagacccccaaatcacgggattgcgtggcttggggaaaaatcttgcaggggtcgggggagaatcgtgggtaaggaatttcaagtccttgagatctgggttgaggagctccctcgctggaatttctaggttcctaagtggaattggggaggccacagagatgaactgggatctcctgtttggagtctaatgttatgaaatcgggactccatgctggatgttgaagaagatctgtgattggaagtcccagcatgggaaaccggggtccagaacctctggtaggaagtttcagatcgtgtgttaggggagggggttttgggactcctgcttgagattttagagttcagggcactgaatcctagttggaaggatgagagaccgttgtttgactggggtgctctgatgaggatgctggattggtggtggtggtggggtccagctcattcatgatttttttttttgagatggagtctcactctgtcacccaggctgaagtgcaatggtgctatctcggctcactgcaaccttgcctctcaggttcaagctattctcctgcctcagcctcctgagtatctgggattataggtgtgagccaccgtgcccggctaatttttgtatttttagcagagacaaggtttcaccatgttggccaggctggtctcaaactcctgacctcaagtgatccacccacctcagcctcccaaagtgctgggattccaggtgtgagccacctcacccagtctcagctcctgattttgatgttctggaatctgtaatcgagattctggttctatgtctctgggttccaatgttctgggactcagcagactgtgaagatgttccaggattccaggtccaggagcctgcctagatctgggagggtggaattagggttctggagctaggttctggagtgaggaggaattggagcaagattgggttttaagacggggtgcaagaatgtggagaagggacgaggtcccagctgagagtcagaggggcgaaagggggaagctgagatcggctacctgggatggaggcagccagggtggccagggtgatggtgcccgtttccgaacccacagggctgcgagaggaccaggcagctcgcggtcaaacccctgagccgccaggcggaggatgggaggatgtcatgtgtgatgtcatcttaaattggggtatcaaatgaggtcaaggcacaggatcagagttagaaggtcatgggtcaagttcttggtgttagaattgggtgttaggctcaagatacaaatcttgagtgtaaacttcagtgggggcctctgctcaaagtcttagatagggctgaggtcaagggtgtgaagccctggtatggggttagagatccttggttagtgacccactttgggaatttctggatgtagttcagagacagggtgcaagaaaatgtatcagggcatcagattagggcatggagttaagactgggtagcctgggttagagtttctggccagctcaagttgtagagcatccagggttcaagcccaatgccctgtgctctgggatctaggtcctggctcagagttgaggttattgatccttgttggagtctggtgttcacaaccgggggcttcgatcgtcacacagagacagggctgcaggatgccaggtcctagagctgaaatcattgatctgcctaatagtttctgagtcactgatccacactcaaggttagggactctggtggcatctgatttctaaattagggtctcaggtcagcaggtgaggttaggttttggcagggggacctggttctggggttaagaagctcaaattagaatttctgctcggagtcacagtatttgggacccaggtccaaacacggttggagccaagattcaatctctgggcctgggctgaaagttgtgattagaaatctaattctggggttggggatctggatctggagctagaccacaggcagcaggtttggggagcccagccctgaggctgaggctcaacagttggtgtctctggtcagactctagggttggggtcatgggtcaggccacggaggtcagatctgagatttcgatttgggagtcagtgtctctggctagggcccagcatcccgggttgctgcatggggtcaagcactctggtcggtcccatggagctctgcactgtagcttcccttccacaggccccgcagggcgccccctgcctctgaggatgagtcactgcagcagccgcgccctgaccctgctgagcagcgtgtttggtgcgtgtggcctgctcctggtaggcatcgcggtcagcactgactactggctgtacatggaagaaggcacagtgctaccgcagaaccagaccaccgaggtcaagatggccctgcacgccggcctctggcgagtctgcttctttgcaggtacagccctcacccgtcttccactcaacagtttctgccttgcctggggtctgagagtcttagccatagtcccatcccttgagttccagaaatccagaaacggatcctgattctctcctggaagttcaaatttctacgtggagccccagtgactagccctttattcctggatctaggagccccaatgctccaggcccctaacccctaaggaattctggagccttcctttaaagtttgtagtctaggtttagaacttgtcccctgcacaatttcagtgctgaatgggcaagattaaaaaaaaaaaaatgcatgggacgggcgcggtggctcatgcctgtaatcccagcactttgggaggccaaggcaggagtatcccttgagctcaggagtttgagaccagcctggccgacatggtgaaaccccgtctctactaaaaatacaaaaattagctgtatgtggtggtgcacccctgtaatcccagctacttgggaggctgaggcaggagaatcacttgaacacgggaggtggaggttgcagtgagctgaaatcacaccactgccactgcgctccagcctaggagacagagtgagactccatctcactctccctagctctgactgctggcatgcacctgtagttccagttattcaggaggctgaggtgggaagattgcttgtgtccaggagttcgaggctgcagtgagctatgacggtgctgctgtactccaacctgggtgacagagcaaaacccagtctcttaaaaaaaaaaaaaaaaaaaaaaagaaaatctatacctcccagggaccacaaagaccaattcattgtaagaatcctggctccccagacctcgtcctctttagggaccacaagttctgatctacagcccctttgttgcttaagacctagagttccagccttgtcctccttcaagcaggagtctctagggcagttagaaagaggagttccaggccaggtgcaatggcttatgcctgtaatcccagcactttggggggccaaggcaggtggatcacaaggtcaggagtttgagaccagtctggccaacatggtgaaaccccgtctctactaaaaatacagaaattagccaggcatagtggcgcatgcctgtagtcccagctactcaggaggctgaggcaggagaatcacttgaacctgggaggtagaggttgtggtgagccgagatcgtgccactgcactccagcctgggcaacagagtgagactccatctcaaaaaaaaaaaaaagaaaaaaagaaaaagaaaagaaagaggaatcccagacagacatccacccacccgctttcccaacacccctggagtagtacagctcgtaacccttgggttaggccttgctcccccatcctggggtctcccctctatctgtcctgcccccacccccagcctctctagagcttaggagcctctcatccagccctgtctgtttctcttccccccaggtcgggagaaaggtcgctgtgtggcctcagaatattttcttgaaccggagatcaatttggtgacggaaaacacggagaatattctgagtgaggggatgtgggggcacctaggcacaagacagcaagatcacagccgagtcgtggagtcctgggagggggcaggactagggaaagggtggggtccaagggaaggaggggaggcttgaaagaaggcagaatgggccaggcatggtggctcacacctgtaatcccagcactttaggaggctgaggtgggtggatcacctgaggtcaggagttcgaaaccagcctggccaacatggtgaaaccttgtctctactaaaaattcaaaaattagctgggcgtggtggcgcgtgcctgtagtcccagctactcaggaggctgaggcaggagaatcgcttgaacctgggaggtggagcttgcagtgagccaagatttcaccactgcactccagcctgggcaactcacagagtgagactctgtctcaaaaaaaaaaataaataaaaggaaggaagaaagaaagaaggcaaggcagagtggtggttaggtaaggagaaagagcaaggttgaaggggtgaggtccggttggtgaggagcggtcaatcagaaagggggcggagttaagcccaaggaggtgtggcctgtgtgagggggcgtggcaggcttgtgtctgccgaggaaatatcaggggaaggagaagagtcagtggggaaggggaggagtcagtaaggaaagggaggagccaaacaaaaacgcagaggtggtgagagcagaggtcaaggaatggggaagtgtcccactggagattcccccctcacccctgtctctccccatcccctccccagagacagtgcgcacggccacccccttccccatggtcagcctcttcctcgtgttcacggccttcgtcatcagcaacatcggccacatccgcccgcagaggaccattctggcttttgtctctggcatcttcttcatactatcgggtgagcctaaggacttgggggttgggggggaccatttccagttccagggacctgtggttccttttccacttagccacttccttgctgtgtggcctgggaggaggtgcagaccctctctgagccccactttccttctatgtgcaatggaaatagcagtgcccattgcaaagcgtccttcagaggaccacattatagcgagggcttactgggtgctaattaggtaccaggctctattctcacactcgcaacaaccttgtgaggtaaatcctattaatagcccattttacagatatggaaacagacactcagagggatgaagtcatttgcttagggccatacaactagtgagaggtagagctgggaatgaaactcacgcaattcgcctccggaggctgtatttttaaccactgctgataaactgcaattaacagtttacaaggctgcttattttctgtgcaatattttgttttaaattttttcaaataaatggaaaagtccaaagaactgtatagggaacacccatgtagccaccacttagagtcaaccattgacaggtcactagacttgcatggtcttgcgtctgtccatctgtctatatgtccaaccatccatcaatccaccttattgtctagatgcatttcagagtaagtttcaggcatcactacacttcaccctacttacgtcatcgtacacgtgattagctagagttcaatatttgtttacagtttttttttccttcttttgaggcacaagcctcttttgcatatgtgatctcacacccgtctcctaacatcgctacccaggagttattattagcactcacttgataacatgggggtaccaaggcccagaattgcatagagagttgcccataagtaccaaggcccagaattgcatagagagttgcccaagatactagtgtaaactatttccagaggacttcagtgtccagagttccagcaatgccttttttctttctttcttttttttttttttttttttgactgagttttgctcttgttgcccaggctggagtacaatggcacgatctcagctcaccacaacctctgcctcccgggttcagacaattctcctgcctcagcctcccaagtagctgggattacaggcatgtgccactacgcccggctaattttctatttttttttttttttttaatagagacggggtttcttcatgttcgtcaggctggtttcaaactcccgaccgcaggtgatctgcccacctcggcctcccaaagtgctgggattacaggtgtgagcccctgcgcctggctttttttttttttttttgagacggagtctccctctgttgcccaggctggagcccactggcgtgatctcggcccattgcaacctctgcctcccgggttcaagcgattctcctgtctcaccttcccgaatagctgggattacaggtgtgtgccaccatgcccagctaatttttgtatttttagtagagatggggttttgccatgttggccaggctggtcttgaactcctggcctcaagtgatcctcctgccttagcctcccgaagtgctgggattacaggcatgagccactgtgcctggcctaaagcttttttcttgagtgttactctcctccaaatttcaactcagtccaatccaattcagtccaattcagctaaaatcagcccaaatcaactcagctcgagtacatttaactccatccatccaacccagctaaccccaattcattctgactcaattcttcagttcatttcaaatgaattcaacataatttaattaaactcaaatcaggttcttgtaattcagttgatagtttatgaacaaaccccactgcatgtctcagctccattctgtcccctggggccggcactcagctccctcttttcagtggctgtgcaaatcgttgaaaagggatcctccaactaagcaactaagatccaaagcacctgatccaatatcctctcctccagtctctgctcctcacccaggctcctcttggtgcaacctcccccatgccttcaacctaacctgaagagaccttttccagggaaagcagggtgcaacctccgtgcaaacttgaatcacagcgggtggagcccagacactgagctaaaataagacacggagaatatcacgatcctagagtgtgagagcggaaaggtctcatcatttttcaaatggaaaaatagtagcctagagacaaaaagtggggcaagagtagatagcatggggatttttattcaacctgtcaaaatcatgataaggaaagtcccattgtttgcggttcacaggaatggaaacagaggctcgaagaggcgacatagcttgtcaatggcagaactggattggaatctagggtattctgattcctaaatccatgcttataccacccactgcaccaggaactgactgcccaaggtcatgctgaggatcagtggtgcaggcaggctggaagtcacgtctctagggtaacaatagagtaattcggaagagattgaatccaactgcctgaattccttcctagcattcatttcacaggctatgacctatgcactccaccccaaggtatccaggcatgtgctgccaagcttggggtgtatagtggctgaaggccacatgttgtaaacctaggaagaattgggttcaaatcttgcctctaccacttacggtttgaaccaaagccttcttttgtggagttattgaggggacaaatcttgatcagtggttggcaagctttttctgcttagggccagatagcaaatattttaggctacgtgagccataggttctccgatgcaactattcaactctactgggatgcaacttggccactgtagtacaaaagctgccaggtgtaagcaaatgggagtggctatgttccagtgactatttgtggactctcaaatttgagttcaatgtaattttcatgtgcatgaaatattcttcttcttttgatttttttttaaatcaaaagaagaataataggtaaaaatcctgcttagctcacaaaccatacaaaagcaggcaatgggccaggtcatcatttgccaacccctcatttagatcatgaatgtaaagcatccgacccactgcctggactgtaacagtaagcactgaacacttgttgttttaagtaaataaataaatgtagtaatgatagtagtactagcggtggtggtgctggtgctggtgatagtagcagtagtagcagtacgagtagtaacaaacaatttttgaatttttattttacttttttattttttatttttttgagatggagtttcgctctcgtcgcccaggctggagtgcaatggcgcgatctcggctcactgcaacctccgcgtcccaggttcaagcgattctcctgcctcagcctcccgagtagctgggattacaggcatgtgccagtgcacccggctaattttttgtatttttagtagagacggggtttcactgtgttagccaggatggtcttgaactctcgacctcaggtgatccgcccgcctcggcctcccgaagtgctggaattgcaggcgtgagccaccgcacgttgcccttattttgattttttaatttttctccccttctggccaaatttcaaattttcccaacccagcctcctcaccatggcattatgctgccccaccaagattaagatcacaaaaaagaaggagatttaaaaggagaagttaaggacagaaatagtaccaatgccttgggacttggaatggaatagcctggggtgactgcctcctgttcgcaatgaggaaaccaggcctcagagagagaaagacagggattgccccagacctggtcattggtggagttgcccaggtctggtcattggtggagttgtcccaggtctggtcattggtggagttgtccccaggcctggtcattggtggacttgccccaggctggtcattggtggagttgccccaggctggtcattggtggacttgccccaggtctggtcattggtggagttgtccccaggcctggtattggtggagttgcctcaggtctggtcattggtggagttgccccaggctggtcattggtggacttgccccaggctggtcattggtggagttgccccaggctggtcattggtggacttgccccaggctggtcattggtggagttgtccccaggcctggtattggtggagttgccccaggtctggtcattggtggagttgccccaggctggtcattggtggagttgcccaggtctggtattggtggagttgccccaggctggtcattggtggacttgccccaggcccggtattggtggagttgccccaggtctggtcattggtggagttgccccaggctggtcattggtggacttgccccaggctggtcattggtggacttgccccaggctggtcattggtggagttgtccccaggcctggtattggtggagttgccccaggtctggtcattggtggagttgtccccaggcctggtattggtggagttgccccaggtctggtcattggtggacttgccccaggctggtcattggtggacttgccccaggctggtcattggtggagttgccccaggctggtcattggtggagttgccccaggcctggtcattggtggacttgccccaggtctggtcattggtggagttgtccccaggcctggtattggtggagttgccccaggtctggtcattggtggagttgccccaggctggtcattggtggacttgccccaggctggtcattggtggagttgtccccaggcctggtattggtggagttgccccaggtctggtcattggtggagttgccccaggtctggtcattggtggagtttccccaggtctggtcattggtggagttgcctcaggtctggtcattggtggacttgccccaggtctggtcattggtggacttgccccaggccggtcattggtggagtcgtccccaggtctggtcattggtggagttgccccaggtctggtcattggtggagttgccccaggctggtcattggtggagttgccccaggctggtcattggtggagttgtccccaggcctggtcattggtggagttgccccaggtctggtattggtggagttgccccaggtctggtcattggtggagttgccccaggctggtcattggtggagttgccccaggtctggtcattggtggacttgctccaggtctggtcattggtggagctgtcccaggctggtcattggtggagttgccccaggtctggtcattggtggagttgccccaggctggtcattggtggacttgccccaggctggtcattggtggagttgtccccaggcctggtattggtggagttgccccaggtctggtcattggtggagttgtcccaggtctggtcattggtggagttgtccccaggtctggtcattggtggacttgccccaggctggtcattggtggacttgccccaggctggtcattggtggagttgccccaggctggtcattggtggagttgccccaggctggtcattggtggagttgccccaggcctggtcattggtggacttgccccaggtctggtcattggtggagttgtccccaggcctggtattggtggagttgccccaggtctggtcattggtggagttgccccaggctggtcattggtggacttgccccaggctggtcattggtggagttgtccccaggcctggtattggtggagttgccccaggtctggtcattggtggagttgccccaggtctggtcattggtggagttgcctcaggtctggtcattggtggacttgccccaggtctggtcattggtggacttgccccaggctggtcattggtggagtcgtccccaggtctggtcattggtggagttgccccaggtctggtcattggtggagttgccccaggctggtcattggtggagttgccccaggtctggtattgctggagttgtccccaggcctggtcattggtggagttgccccaggtctggtattggtggagttgccccaggtctggtcattggtggagttgccccaggctggtcattggtggagttgccccaggtctggtcattggtggagtcgtccccaggtctggtcattggtggagtcgtccccaggtctggtcattggtggacttgccccaggtctggtcattggtggacttgccccaggtctggtcattggtggagctgtcccaggctggtcattggtggagttgccccaggtctggtattggtggagttgtcccaggtctggtcattggtggagttgtccccaggtctggtcattggtggagttgccccaggtctggtcattggtggagttgtcccaggctggtcattggtggagttgtcccaggctggtcattggtggagttgtccccaggtctggtattggtggagttgtccccaggtctggtcattggtggagttgccccaggcctggtcattggtggagttgccccaggcctggtcattggtggagttgtccccaggtctggtcattggtggagttgtccccaggcctggtattggtggagttgccccaggtctggtattggtggagttgtccccaggcctggtcattggtggagttgccccaggcctggtcattggtggagttgtccccaggtctggtcattggtggagttgtcccaggctggtcattggtggagttgccccaggtctggtattggtggagttgtccccaggtctggtcattggtggagttgtccccaggtctggtcattggtgcagttgccccaggtctggtattggtggagttgtccccaggtctggtcattggtggagttgtccccaggcctggtcattggtggagttgtccccaggcctggtcattggtggagttgtccccaggcctggtcattggtggagttgtcccaggtctggtcattggtggagttgtcccaggctggtcattggtggagttgccccaggtctggtcattggtggagttgtcccaggtctggtcattggtggagttgtcccaggctggtcattggtggagttgccccaggtctggtcattggtggagttgtcccaggactggtcattggtgcagttgtcccaggcctggtcattggtgcagttgtccccaggcctggtcattggtgcagttgtcccaggctggtcattggtggagttgccccaggtctggtcattggtggagttgccccaggtctggtcattggtggagttgtcccaggtctggtcattggtggggttgtcccaggctcgtcattggtggagttgccccaggtctggtcattggtggagttgtcccaggtctggtcattggtgcagttgccccaggtctggtcattggtggagttgactcaggctggtcattggtggagttgccccaggcctggtcattggtggagttgtcccaggtctggtcattggtggagttgccccaggtctggtcattggtggagttgtcccaggactggtcattggtgcagttgccccaggcctggtcattggtgcagttgtcccaggcctggtcattggtgcagttgtccccaggcctggtcattggtggagttgtcccaggctggtcattggtggagttgccccaggtctggtcattggtggagttgccccaggtctggtcattggtggagttgtcccaggtctggtcattggtggggttgtcccaggctcgtcattggtggagttgccccaggtctggtcattggtggagttgtcccaggtctggtcattggtgcagttgccccaggtctggtcattggtggagttgactcaggctggtcattggtggagttgccccaggcctggtcattggtggagttgccccaggtctggtcattggtggagttgtccccaggtctggtattggtggagttgtccccaggtctggtattggtggagttgtccccaggcctggtcattggtggagttgtcccaggtctggtcattggtggagttgtcccaggctggtcattggtggagttgccccaggtctggtcattggtggagttgtcccaggtctggtcattggtggagttgtcccaggctggtcattggtggagttgccccaggtctggtcattggtggagttgtcccaggtctggtcattggtgcagttgccccaggtctggtcattggtggagttgtcccaggcctggtcattggtggagttgtcccaggtctggtcattggtggagttgccccaggtctggtcattggtggagttgccccaggtctggtcattggtgcagttgccccaggtctggtcattggtggagttgccccaggtctggtcattggtggagttgccccaggcctggtcattggtggagttgccccaggcctggtcattggtggagttgccccaggtctggtcattggtggagttgtccccaggtctggtattggtggagttgtccccaggtctggtattggtggagttgtccccaggcctggtcattggtggagttgtccccaggcctggtcattggtggagttgccccaggcctggtcattggtggagttgtccccaggtctggtcattggtggagttgtccccaggtctgggtattggtggacttgccccaggtctggttattggtggacttgccccaggtctggtcattggtggagttggtcccaggtctggtcattggtggagttgtcccaggtctggtcattggtgcagttgccccaggtctggtcattggtggagttgccccaggtctggtcattggtggactttccccaggtctggtcattggtggagttgccccaggcctggtcattggtggacttgccgcaggtctggtcattggtggagttgtccccaggtctggtcattggtggagttgtccccaggcctggtcattggtggagttgccccaggtctggtcattggtggagttgtcccaggtctggtcattggtggagttgtccgaggtctggtattggtggagttgtccccaggcctggttattggtggagttgccccaggtctggtattggtggagttgtccgaggtctggtattggtggagttgccccaggctggtcattggtggagttgcccaggctggtcattggtggacttgccccaggctggtcattggtggagttgtccgaggtctggtattggtggagttgccccaggtctggtattggtggagttgccccagttctggtattggtggagttgccccaggtctggtcattggtggacttgcctagggctggtcattggtggacttgcctagtgctggtcattggtggacttgccccaggtctggtcattggtggagttgccccaggtctggtcattggtggacttgccccaggctggtcattggtgtacttgccccaggtctggtcattggtggagttgccccaggtctggtcattggtggagttgtcccaggctggtgattggtggtgttgtccgaggtctggtattggtggagttgccccaggtctggtattggtggacttgcctagggctggtcattggtggacttgccccaggtctggtcattggtggagttgccccaggtctggtcattggtggacttgcctagggctggtcattggtggacttgcctagggctggtcattggtggacttgccccaggtctggtcattggtgaagttgccccaggtctggtcattggtggacttgccccaggctggtcattggcggacttgccccaggtctggtcattggtggagttgccccaggtctggtcattggtggagttgtcccaggtctggtcattggtggagttgtccccaggcctggtcattggtggagttgccccaggtctggtattggtggagttgccccaggtctggtattggtggagttgccccaggtctggtcattggtggagttgtcccaggctggtcattggtggacttgccacaggtatggccattggtggagttgccccaggctggtcattggtggacttgccccaggctggtcattggtggagttgtcccaggctggtcattggtggacttgccccaggtctggtcattggtggacttgccccaggctggtcattgggggagttgccccaggtctggtattggtggagttggcattcaattgtggagaaaccagtggaagggctcaggcaggaggattacggtcacagctgcgcattaaatgtctcacagggacctctgctggggatggactagagggaaagagactggaaatgtacaaactgaggatgcttgtgtagtggcccaggccgtagcagataaggtctgtgctggggctggagatgtgaggaaaaggcaattggatggccatgtgagagagggatattgatggaagaatcaatagaatcagatgactgactggatgtggttggtagaagtgggaggaagctagacgggcattggtttttttccaggtcataagaggcatgtgcatgcctgtcccacattagcccctgatcattaaacatgatctgtggatatgcttattcattcaatcttcagatgtcctgtataccaggccctgtccttggcacagaaaacacaattaaatctcatgtgtagcccatgtgcactcactcacagaacagctcccgactacctgtcagtcaaagcttttcacactttttcttaaatcccttcaatagatccccattacacttagaatacacccaaatgcctcagtctgtcctccaacgtcttctatgatttggctactgctcagatctctgacctcatctcctcacccactagcactctccgcattgcttgtaacttcagccacactggcctcattcttctccttgaaaatgctaatcacagcctcacctcaggacttcgtacactcattattcctccctgcttggaagtcctttccccacctccaactccacccgaccctaattctcagaagcctcaaactttttctcttcagagttgctttctctgacaacagtacctagtattcccttaccctggcgatactatcacatgctttatttcatattttttcatagcatttattgctactgttgtgccatttgttttttgtcttcttgtatcagaatgtaatcttcaaaagggctgggacaggccaggtgcggtggctcatgcctgtaagcccagcactttgagaggccaaggtgggtggatcacttgaggtcaggagttcgagaccagcctggccaacatggtgaaaccctatctccactaaaaatagaaaaattgactgggcatggtggtgggcccctatagtcccagctacttgggaggctgaggcaggagaatcacttgaacctggaaggtgaaggctgcactaagccaagatcatgccactgcactctagcttggtcgacagaacaagactctgtctcagaaaaaagaagagtgagggggatgctgagaccttttctttcctttttctttttttctttttttttgagacagagtcttgctttgtcacccaggctggagtacagtggcgtgatctcctgccttagcctcccatgtagctgggattacaggcacctgccaccacgcctggctaatttttgtatttttagtagagacgggattccaccatgttggccaggctggtctcaaacccctgacctcaagtgatccacccaccttggcctcccaaagttccgggattacaggcgtgagccactgcggcgcagctgggctgagaccttttcaaacatgttcttgtttgtatcttagagcctagaggtgttgtttgtatgaagtgcaaactgaaatatttccagaatgagtgagggcagaagggatgagtgacagtcttgcatattctaagaaaagggaagatgcattaacctgacatagtagggtgctctggagagggtgagagagaccagggagggctcccaggaaaaggtgacagctaagttgatgccgaaagggtcagggggaaattttcaagtccagaaagaaaagagcctggtttggagatgggattcacagcatgcgataaggtcctagaaaggagctaggacaggccagccatggtggctcacgcctgtaatcccagcacattgggaggccgaggcaggcaggtcacctgaggttaggagttcgagaccagactagccaacatggtgaaaccccgtctctattaaaaacacaaaaattagccaggcctggtggcaggcgcctgtaatcccagctactcaggaggctgaggcaggagaatcgcttgaacccgggaggcggaggttgcagtgagccgagatcgcaccattgcactccagcttgggcaacaagagcgaaactccatctcaaaaaaaaaaaaaaaggaaagaaaaaaagaaggcagctaagacagaggtcgacgccagtgcacctgtccatggtcctgaaacccagttgctctcaagtcaggatggttctattcagcttggaatgtaggtgactcttgcctactgtgctttaagaattacaaagcagatgtagttgagggggtgggaggagagtaagagagttggattgcagagatagaaaggaggaagggaggggagaaaaagagaaagggaaaataaggttatttttggagaaccagggctaatgcaaaatggccagaaagaaaaagcaacgataagaatgacttactacaaagaaaaaagaaaacaaaatctcttcctcggtggaaatatttctttctttctcatcagaccctggtcctgattctgcttatggagattggtatttatttatttatttatttacttattgaggcagtgtcttgctctgttgcccaggctggagtgcaatggtgcaatgtcggctcactgctacctttacctcttcggttcaagcaattctcatgcctcagcctcctgagtagctgggattacaaacgtgcaccaccatgcctggctaatttttttttgtatttttgtagagacggggtttcaccatgttggccaggctggtctcgaactcctgacctcaagtgatctgcccacctcagcctcccaaagtgctgagattacaggcatgagccaccgcacctggcagaatgtttgttatttagagctgtaatgtgaaacttggaccttaagtctggggttggagtgaactatgaggcaggtgttgtcagcaggaaccagatcacagacagcctggaacgacaggctgacttgtttctcctgtggacaatgaggagccaaggaagagttctgagcctggagggatagagtctgctttgggtttcagaaacggagatgaggattttggaacaatggtacaaacatacagaataaggcctgaaggccgggcacggtagctcacgcctgtaatcccagcactttgggaggctgaggttggcggatcacgaagtcaggggttcgagaccagcctggccaacatggtgaaaccccatctctactaaaaatacaaaaattagccgggcatggtggcgcacgtctgtaatctcagctactcaggaggctgaggcaggagaatcacttgaacccgggaggcagaggttgcagtgagctgagatggcgccattacaccactccaacctgggtgacacagtgagactccacctcaaaaaaaaaacaaaaaaaaaaaaaaaagagagaataaggcctgagctggggcaagggacttggggaagcaaaaagggggttagatttatgaggaattcaggaagtaaagcagacataatttgattgtccttcagtgaccatccctgatggatgagagagagagagggagagagagagaggaaaagaggagtgaagctgattcccctgcatctgagttaggcactgcagtgaatgtgatttttgggcttccttcaatcttcctttgctataaacctgctcatatttcaagaccaatctcaggtgcattttcaccatgtaatgcttcatgatcattctctttatttttgtattttttaattttttgagatggagtctcgctctgtcgcccaggctggagtgcagcagcataatctcagctcaccgcaacctccacctcccaggttcaagcgattctcctgtctcagcctcccgagtagctgggattacaggcgcccgccaccatgcctggctaatttttgtatttttagtagacagagggtttcaccatgttggccaggctggtctcaagtgatctgccctccttggcctcccaaagtgctgggattccaggcctgaaccaccacgcccagcctataatcactcccttactgcgtctcaacattatggaatactagaagttgaaagtgttatggaagttcagagcaagggaaaagttaattcttggaagggatagaggaatggtgggatttagagtgaatgggcttttctagatgttccagctgcatagcaagtatgttcttcatccattcaaagagaattgactacttgatggagaataataaaaaacaaggtggacttgtttctagcatcatggagttcctagcatctaactggggatggaggagatgtctaataaaaaagtaacaaatagataatataatgttagatggtgctacatgctacaaaaaaaaaaaaaaaaaaagcaggttaggaggagagtgatggggaggggttattatattatcccacccacctgaataatccaaggtttttaaatgtttttctctctatctctctatctttccctcctacctcaccatttttttttttttcttgagacagagtctcactctgtcacccaggctggagtgcaatggtgccatctctgctcactgcaacctctgccccctgggttcaagcaattcttctgcctcagcctcccgaatagctaggactacaggcgggcaccactacgccaggctaatttttttttaaatttgagacggagtctcactcttttgcccaggctggagtgcagtggctcaatctcaactcattgcaacctccacctcccaggtacacaagattctcctgcctcagcctcccgagtagctgggattgcaggtgcctgccaccacgctctgctaatttttctgtatttttagtagagacggggtttcactgtgttagccaggatggtcttgaactcctgacctcatgatctgcccacctaggcctcccaaagtgctgggattacaggcctgagccaccgcactgggccaatttttgtatttttagtagagatggtgtttcaccatgttggccaggctggtcttgaactcctgacctcaggtgatctgccctcagcctcccaaagtgttgggattataggtgtgagccactgtgcccggccccacctcactttttaaacacaccacacacagattttttttggctttagcatttgaaagtaaattgcatacatgttgatagttcatctctaaaattaagtgttagtatgcatcctttaaggctaagggtcgggtgctgtggcctcactttgggaggccgaggtgggcacattacttgagctcaggagttcaaaaccagcctgggcaacatggtaaaatcccgtctctccaaaaattaccaaaagtcagccaggcatggggcatgcacctgcagtcccagctactcaggagggtgagctgggaggatggcttgagcccaggaggcagaggtcgccataagctgagatcgtgccactacacttcagcctgggcaacagagccagatcttgtctctaaataaataaataaatagaagaataatacattcgtctacgtaactacaacaacattatcagacatggacgttttataattccataatacaatttaatacatttttaaactgtcctggctatttcaagaatgtcttttataactctttccctagaaccaggattcattctaggtccatgcatgacatttagttaataagtctcttttttggctgggcgcagtggctcatgcctataatcccagcactttgggaggccgagctgggcagaccatttgaggtcaggtgtttgagaccagcctgaccaacatggtgaaaccccatctctattaaaatacaaaaaagttagccaggtgtggtggtgcatgcctgtagtcccagctactcaggaagctgaggcaggagaatcgcttgaactcaggaggtggaggttgcagtgagctgagatcacaccactgcatccagcctaggtgacagagtaagactctgtctaaaaaaaaaaaaaaaaaaaaaaagaaaggaaaaaaagcctaattccactactatttgtttttaacaacgctgacttttttttttttttttttttgagatggagtctggctctgtcgcccaggttggagtgcagtggcacgatctcggctcactgcaagctccgcctcccaggtttgcgccattttcctgcctcagcctcccgagtagctgggactacaggcggccaccaccacgcccggctaattttttctatttttagtagagatggagtttcaccatgttagccaggatggtctcgatctcctgacctcgtgatccgcctgcctcagccttccaaagtgctgggattacaggcgtgagccactgtgcccggccagcactgactttttaaatatatctcattattaaaatataaaaagaagccaagcacagtgactcgagcctgtagtattagctactctggaggctgaggtggaagaatcgctttgaacccaggagatggaggctgcagtgagctatgatggtaccactgcactccagcctgggcaacagagtaaggccctgtctaaaaaaaaaaaaaaaaaaaagaattaaaaaataaaataaaatatagaaagaatagtataatgaaattcatggatcctgcactcagtttcaacaattaccaacatatggcaaatctgtttttagtcatattgccatgtcctcttctgcatttcactacattattttaaagccagtctcagacatcatttgattcacagatatttcagtatatctctgagttataagtagtcttttatttactataaccacaatcccatgatcaagcccaagcaactaagaataattacttaatattatctcatatctagttaatgctcactcttccccattggcctcataaatgcctctttctagttcatttgttgcaaatccagatccaagttccacatgtacattgagttgatagatctctgaagcctctttcaacctaaaacggtccctctcctatttttttctggccatttatttttttgagaaatttgcatttttgttatgtggaattcccacattgcagttttccaatggaatcttctgttgtcgtttaatatgttcatctatttcagtgttttcttttctctctcctttttttttttttttttgagactgagttccgctcttgtcgtccaggcactgcaacctccgcctcccaggttaaagcgattctctggcctcagcctcccgagtaactgggattacaggcatctgccatcacgcccggctaattttgtattttaatagagatggggtttcgccatgttggccaggctggtctcaaactcctgacctcaggtgatccgcccgcattggcctcccaaagtgctgggattacagcactttgtgcgtgagccactgagcccagccttttctttttttgagacagagtctcactctgtcacccaggctggagtgcagtggtgcaatctcggctcactgcaacctccacctcctgggttctgcaacctccacctcctgggttcaagtgattctccagcctcagcctcctgagtagctgggattacaggtgcccgccaccacgcctggccaatttttttttttttttttttttgagatggactctcgctctgtcaccaggctggagtgcagtggtgcggtctcggctcgctgcaacctctgcctcccaggttcatgcaattctcctgcctcagcctcctgagtagctgggactataggcgcccaacaccacacctggctaatttttgtatttttagtagagagggggtttcaccatgttttggacaggctggtctcaaactcctgacctcaggtgatccacccgcctcagcctcccagagtgctgagattacaggtgtgagccaccacactcagcctattcctgtgttttcttgtaagccaagatctaaaagaagcttagatggatgcaggtttgatttttttttttttttggcaagaacactttatacataggtggtgctattcacatcctgctgtgtctattacatcaagagacacagattgtctgattgtctctctttttgagatattagagttgatcactggtttgagtgtcattagcttgctccatgtcatcgtttttctgaagactgagggacagggtatcctggtgaatgtcctgcatcttgggtttattgtttaatttttatttatttatttatttatttttgatacagagtctcgctttgtcacccaggctggagtgcaatggcgcaatctcagctcattgcaacctccatctcccgggttcaaacaattctcgtgcctcagcctcccaagtagctgggattacaggcctgcaccaccacgcccggctaattttgtatttttagtagagacagggtttctccatgttagtcaggctggtctcaaactcctgacctcaggtgatacacccacctcagcctcccaaagtgctgggatgacaggcgtgagccactgctcccagctgcatcttgaatttatttgtttcttcatggtaacacttcatttgttcctctttccttgtattttctgtaacctggaagttctgtctagactagaggcttgataacattcacgttaaacatcattggcaagaaaagtcagaggtgccgctgcatactttgtatcacgttactccagggagcaaataatgtcaggttgtcccacagtgagtggtaccagcttgaacccttggtaaagatggtgtccatcagagctccccatggaaaaggtaggtttttctttttacaatgaaaaagcaaggccaggcacagtggctcatgcctgtaatcctagcagtttgggattccgaggcgagaggattgcttgagcctaagagtttgagaccagcgtggtcaacattgagaccctgtctcttaaaaaaaaaaaaaaattagccaggtgtggtggcgcatgcctgttgtcccagctactccagaggctgagacaggaggatcacttgagcccaggagtttgaggctgcagtgagccatgatcatgccattgcactccagcccgggccatagagcgagaccccatctcaatagataaataagtaaatgaaatactagtgtgcaggtaatactttagcattttgaaaaaaaaaaatcttggtttgggatactcgtattttacattttttattttggagaaaatttaagactacaggacgcttgtaaaaataatacaatgaactctcatatccttcacctagcccagtttttcaacattttacaacatttgcctttctgtctctctctctctccatatatatatatagatctatatacacatatatgtatacacatattacatatacatatatacctatgtatacacacgttatatatacatatatacacacaaatatatgcatatgtgtgcacaaaaaatatatatgtacacacattggtgcaaccacttgaatataagttgcaaacacttcactagttcagcaagtatttcctaagaacaagggcattcttttacctaaccacagtacaataatcaaattcaggaagtttaaggtctataaaatactatagctaatatctagtcctacatttaaatttcaccaatgtcccaatactgtctttttttttttttttaattgagacagtcttgctttgtcacccaggctggagtgcagtggctcaatcttggttcactgcaacctctgccttctgggttacagggattcttgtgcctcagcctcccaaatagctggaactacaggctaatgccaccacgcctggctaatttttgtgtttttagtagagacaaggtttcaccatgtgggtcaggctggtctcaaactcctaagctcaagtgatccactcacctcagcctcccaaactactgggattataggcgtgagccaccgcccccaccctccaatactgtctttttttttttttttttttttttgagttggagttttgctcttgtacccaggctggagtgcaatggcgcgatctcggctcactgcaaccttctgcctcctgggttcaagcgattctcctgcctcagcctcccaagtagctgggattacaggcacccaccaccatgcccagctaatttttgtatttttagtagagacaggatttctccatgttggccaggctgatctcgaactcctgacctcaagtgatccacctgccttggcctcccaaagtgctgggattataggcgtgaaccaccacgcctggcctaatgctatctttttactgttactttttcctgattcagaatccaatctaagatcacgctttgcatttccctattgtgtctctttagtctcctttcatttttttttttttttaatacgtggaggatgccatgtgaacctttcattttttatggagctctgctgcctttttttttctttttcaatctttcatgttgacgtttttgaagagtgcagccagttgggctgtagagtgtcccactgtcctcatgagtggattcaggttacgcattctcagcaggaacacgacataaaggagggagtggtttgctcagctctcttctctggaggcccgtggtgtaggtctgccctgttgctggtgatgttaactgcgatcacttggttaaggcagtatctgccaggttctttcaccataaaggaagctttttatctctgtaataattaatagatcttctgtggggagattctgtcatccagcaatcgagcatcccctcgtgactcttgcctgaatctaacattactactaggattgcagaatggtgttttcttctaactctattattccacctacatggataaattggtgtgctactgaaaagaactttctcttttttcttattttaaatatgtatcagtgtggactcatgtattttattctattttgtttttaatttagtttttgtttttttgagacggagtctcactctgtcgcccaggctggattgcagtggtgggatctcggctcactgcaacctctgcctcctgggttcaagcaattcttgtgcttcagcctcccaggtagctgggattacaggcacccaccaccatgcctggctaatttttgtatttttagtagagatcaggtttcaccatgttggccaggctggtctcaaactcctgaccttaagtgatctgcccaccttggcctcccaaaatgcagagattataggcatgagccaccgtgcccagcctaacttaattgagttttttgagacagtctccctctgtcacccaggcgggagtgcagtggtgcagtcatagctcactgcagccttgaactcctaggctcgagggatcctccctcctgagcctcccaagtagctaagacaacaggaactaattatttatttttagtagagatggggtctcactatgttgtccaggctggtcttgagctgctgacctcaagtgatctgcccacctcggcctcccgaggtgcggagattccactcatgagccacggtgcccagcctccattatttttcaacggcaagtcatgctgcgataaatcagcctgtgcatgtgtggtttcccatcacgggagagatatcctcaggataaattcctggaagtgggattgctgggttaaaggacagatccgtgtgtgattttgttagatgctactaaatcccctttcacgtggcggcaccgttttgcattcccaccagcaatgtagaagaacgtccattctctcagcctccccaaaagagtgtgctgtgaagcttttaaacttctgactacccggttgatgagaagtggtagctcatcatatttttcatttgcatttctcaaattttgagtgagggaaatctacttttttcaacagggagatcataaaagtctcctccccccttcccttccctcccctcccctcccctcccctcccctccttctcggagttttgctcttgttgcccaggctggagtgcagtggcacgatcttgactcattgcaacctctgcttcctgggttcaagtaatcctcctgcctcagcatcccgagtagctggggttacgagtgtgtgccatcgcacccagctaatttttgtatttttagtagagacgaggtttcaccacggtggccaggctggtctgaaacccctggtctcaagtgatcctttcacctgggcctcccaaagtgctgggattacaggcttaagccactgcgcctggcccatagaaggtctttctaaagaggcaacaagtgaggagagatctaagtgacagaaatagacatggggaaatctgggggaagagcattccaggtagaaggaatggcaagaccaaaggccctgaggcagaagtgagcttgaggagttcaaggaagagcaagaaagttaggtgttctaggccgagtgtggtggctcacgcttgtaatcccagcactttgggaggccaaggtggaagaactgcttgagctcaggagttcgagaccagcctgggcaacatggggagaccctgtctctacaaaaaaatgcaaaagttagccccgcatggtggtgcatgcctgttgtcccagctactcatgagtctgaggtgtgaggattgcttgagccagggaggtggaggctgcagtgagctatgattgcaccaatgcactcctgcctggacaacagagcaagaccctgtcccaaaaagaaaaaaagtaaagaaagttaggtggtctaagaaaaagaaacaaggagaaactgatcagagatggtgtgggcaggtaccggaccatttatatactgcagtctaagaggtcagcgaagttttctgtaaagagccaaataataaataccttcagctttattggccacccagtctctcttgtaactgctcagccttgtggttgtagcaaaaaaccagtcacaggcaatatgtaaacaaatgggtgtggctgtgttccactatcatttgtagaaaccaaaatttaaaattaatgtactttaaaaagttgagatataaagccaggcacagtggctcacgcctgtaatcccagcactctgggagatgaggtgtgcagatcacttgagatcaggagttcgagaccagcctgggcaacatggcaaaaccctgtctctgcaaaaaatacaaaaaattagccgggcgtggtggtgtgcacctgtagtcccagctactagggaggctgaggtgggaggatcacttgagcctgggaagtgaaggctgcagtgagccatgattgtcccagtgctctccagcctgggtgacagagcaagaccctgtcttcaaaacaaaacaaaacaaaacaaaaaaggccgggtgtggtggctcacacctgtaatcccagcactttgggaggccaaggtgggcagatcacttaaggtcaggagtttgagaccagcctggtcaacattgtgaagccctgtctctactaaaaatacaaaaattagccaggcatggtggcgggtgcctgttaattccagctacgcaggaggctgaggcaggagaatcgcttgagtccaggaggcagaggttgcggtgagccgagattgcaccactacactccagcctaggtgacagagcaagaatctgtctcaaaaaattccaaaaaacaaaaaacaaaattgagatgtaattcacatactataaatttcatataattcagtgatgtttcagtacatccacaaggttgtgcaaccatctccattagctaatttcacaacattttcattattctcaaaagaaacctcacacaccttagcagccagacacaatttccccctccatcctattccctggcaaccactaatctactttctgtctctgtggatttgcctattctggacattgcatataaatggaatcacacaatatgtgatattttgcatctggcttcttttagcttgctttctaggttcatccctatggtagcatgaatcagtatatcgttcccttttttggctgaatagtattcctgtatatggatataccacattttgtttatccattcatcagctgatgggcatttgggctgtttccgctttttggctattacgcataacgctgttacaaacatccgtgtatgcgtttttgtatgaacatatgtttccacttctcttggggacatacctaggagtggaattgctgggtcatatgataattctatctttaactttttgaggcgctgccaaatgaaattcatatactttttatgtgccacaaaataccagtcttgttttgatttttaacatcatttacttatgtgaaagccattcttagctggtgggccatacacaatgagggggtgagctgggtttcgtccatggaccatggtttgccgaccaccggtgtagacagtggaaggaatttgggcttattctgtgtgtggcacacagaatgtaggattctaggggaagaggttgatagggattagttagatacatttaaggcagggaactttatagcctccttaagccactcttggcatggttactgtttagaggaaatttcatctggagaaaatgataatcgcctcttagaaattctcagattggacctctcctctgcacactgtccgtatgctctatttcctcaattgtaaatggtgttaaaaatgtacctccttcaaagaggtgttgtgaagtttgaatgaatgtatatatatacacaacaccaagaacagtgcctggcacagaccaagacctatataagtcgttgctattattattgctattgttgcaattattatccacacagcctcagctcaggcctcatcctcttcgccctggaatatgtctccctccagtctgttcccagcatcaaccagcccccaaagtttcttctaacactgggatctggccctgtccttcctctgctacaaactttgtgtagctccctagcacccttggcgtcaacacccagctcctgggcccggcattcgaggctcaccatggctataccttcccctttctctaacctcatttcttgtggctacagcttatgttacagctacatgggtggaccagctctattttccctccttccgaaacctttgcccatgctgtgcactctgccagtgtgcccttattcttctctgggcctcatcctttaaggccgggcgcggtggctcaaacctgtaatcttagcatttggggaggccgaggtgggtggatcacctgaggtcaggagtttgagaccagcctggccaacatggtgaaaccccgtctctactaaaaatataaaaaaaaaaattagtcgggagtggtggcgggcgcctgtaatcccagctacttgggaggctgaggcaggagaatcgcttgaacctgggaggttgaaggttgcggtgagccgagatcgggccactgcactccagcccaggccacagagtgagactccatttcaaaaaaaaaaaaagagagaaaagaaaagaagacttgaacaaagaaatctttccttcatttctcttgcccctgccccaggcaggtttggcactccttccagagtcccacacagcgtgctacttccttgtagcacctatcaccttatatgtgacttaatcagtgtgttcctattttccttctccaattgtattgtgagctcctggatggcagatttagggggataaagggggaggtggttgttgattcatctctgggctccctgcacccaaccaaggcccagcatacaaggggcttcagggaagttagtccaggacagaatggggaggaggggaaggcagtgaggtggggctggggctgggaaaaggggcccacttctaatggacgagggcaccccctctgctcccctaggcctctccttggtggtgggcttggttctttacatctccagcatcaacgacgaggtcatgaacaggcccagcagctctgagcagtattttcattatcgctacgggtggtcttttgccttcgccgcttcctccttcctactcaaagaggtgacgtccgtgggacctagactctagagttctgaatggagagaggtcttgggggcctggttcctgagtccaggaggaaggagaggctggagatgcagactctggcgtcagagggaggtggtagctgagggtctaacccctgggtcctggaggaagaggggtctgagagctccaacttttgggatcctgggggaggaggggtctggagactgggactcctgggtcttgagggaggggccaacctgagggcttggactcctgaggtcccggggaaagagagggctggagccctgatcctgggtcctgggataggaaggggcttggggtggggactctgagtcctggagtgagaggagatgagtcggggtccggggatgcgcaggggggcgcccctgggactctgaccttgccttgccgcagggggccggcgtgatgtccgtgtacctgttcaccaagcgctacgcggaggaggagatgtaccgtccacacccggccttctaccgcccgcgtctcagcgactgctccgactactcgggccagttcctgcagcccgaggcgtggcgccgcggccggagcccctccgacatctccagcgacgtgtccatccaaatgacgcagaactaccctcccgccatcaagtacccggaccacctgcacatctccacctcgccctgctgaggcccgcccctcggagctccccctgcctcctcctcctcctcgtcttaggggggtctccctgcaatgcagcgcccccttccgtcctcgggactcctcgctcccacccggaggaggctgcgccagctttaggccccgccctcctcccaatggctccgcccacagactcccttatttcaatggccgcgccctcttttcccgacctctccttttcattggtccctctcactcccaaatgactcctccccttcgttggcccgcccctttcctctggcccctcctctccaagaaaattagctcctccctcgttctccacctgctctgagctgggagcagccagaggcggtgcaagcgcccagctccccagagctccccaacctcggacctcaccgcaggggcgctgggctggagagcaggttcgggcagccgtcgggaataccgaccatcctcttctcccttctaacctgggcttcctttttccctgcctaatctcacctcctgacctgctgggtcctccggtgcagtgggagggccggcttgctccacccgcagccccggggtggcgtagggaagggggctggaagccacgggtacggttaacctggcccttccctccccatctcccctacttccctggaaggtcccattctttctcaccggctgggctcttttctgcttcctgaaggttacctgccttttagggggctcttgtctaaaggatcttcttgctttctcagctatccttggcttctttttcgtcttcctcctcctttaactctttctctcctttcctcccttcacccgttcgtcccaagcccttgggtgcatcccgccctaggcgcacaccagacggccagaatggggaccctagggtggagggaattcccccacgccatctccgcacctgtgcccgcctctcccccctcgaggccccgtcgagggagggaggggcagtagcgggggtcgacaccccccccaaacctctaagtcttccattttctggctctcctcctcattgacgtccctcttcccccctcagaaccccaactctggcctctttcaagggcccgtccgccccgttggacagattttggggggagaggaggtcaccaggaactcgcccacccccccttattagggaaagaggggcgaggtagcacagtgctgtacacggaaccagaatggcccccggggtggggggaggggggcaggggagggacgggggcttttagtttgcatcttaggtgggaggggggaggggggacccgccgcagttaacctgactttacgcagcgatttttaacgaggctggggggaggggggcactggggtggggacagggtggggtggggggcctggctctgttatttaccgtgtatcatatgtaaatatcgacagaaacttcaataaactttatttcaaacacgtctccgcctgcccggagggaagggattggatagagggggcttagtctgggtctctgcttctagggttgcaggcctaaagtactgcagaatgacgttagatgggtcgttgttaaatgacttaatcatcatcattatcaacggcagcgctttatacttcagtccgtgtaaagcatgcaggaccgtaaatgatactggtcaggatcaataaacgctttctcctggtattattatgaccacgtagagtactgttactatgactcggcttccttcgacattcattgcttcttttaacttttcccccaagcctgcacggtcaatttattggcctcattttgcagataggtccagagaggtgaagtgacgtatccaagatcacacaggtggaagttggcagagccatttgctaaagccaagtttaggcctggtgcggtgactcacgcttgtaatcccagcactttgggaggtcaagctggggggatcacttgaggtcaggagttcgagaccagcccagccaacatggcgaaaccctgtctctactaaaaacacaaaaaaattagctggccacggtggctcacgcctgtaatcccagctattcgggaggctgaagcagagaatcgcttgaacttgggaggcggaggctgcagtgagccgagtgcactgcacgccagcctgggcgacagagtgagactccatctcaaaataataataaaaccaagtttatctggttctgaagctcaggcttcctcccccttgcactaggcagtggtgggttttcccaatgcttggctcagtccctctgttaagaaatgactgctaccatttactgcacacctaccctgagccagacgccttccttccttacatgatctcattagacattcacagcaaccctgtatgtaggaattatcaccccatttttgcaggtgaaggaggcaggctcggaaagtgggtgccacaatctgcagtctcacccactatactgagagactgagaacagcctaaatgtttgataagcttatttttgcagcgtattgtaaaggaaacaccgtgccagatcttcccttctttgccttgtctagatttggcctcttaaggatccatcagaataacttttgctgttacagtcacaactgttaacaaccaagacacatttatcaggtcatcattagggtatcagacaccgcactaagcacttttttaaaaaaaaatagagacagggtatccctgtgttgcccaggttggtcttgagctcctgggctcaagggatcctcctgcctcggcctccgaaagtgctagaattacaggcatgagccaccctacccagcctgcactaggcacttttgatttattagctcattgaatccttccaaccatcctgtgaatcaggcatcccaattagccccattttatagatgaagaaaccgaggctcagggaagtgaggccacccagctggtaagatgcggaggagaattcatgcccagcctgtctgacctcagagcccacactcttagctgctataatttactactatggatttggtgcaaactcattctgtgaccttgagcaaatctttgaatctctggggcttcagtttctttttctataaaaaaataaaaaaataccgagggcactggttggtttagaaggattccaaatccctctggaatagggaggttggtgggggtaagttagcaggaaagagttctgaatcagcaggactggactcccggagggaaatattctaagtcattttcaataatttcaccaatttctggaggtcatgcttgagattcgggatggcaaatcatgtttcagcttcgttgtcaaaactaagtgattcgtacgggctgcttggagcccggtgttagaaggattctgaacatctgctcagtgggaaagagtgttgccattgattggtgctgtctgccgtgctgctcaattggtgctgtctgccttgcctgcaggatgggctgtggtgacgcaaatgctagatacttgctaacactatggggaagttaacaacctaaaatcctaagggttgtgttcttttaaaaaatcaagctagttcttttgtttattaaactttgaaaatggaatgtaatcccacagttcgagattggtgagttttttgatttgttttaaagaaatgctgtgaaaagttccacctttatttatccaaagtaagtcaggatgtcctaacattctgaaatcctcctcttcctgaggcattattagttttcaatgtataatttcaggaatactctatgcatattcaagcatatatgcatgtgtttaaatccacatacagatgagtatgtggtatacatatttttattttatacatttatcatgtaatgcacatagttctgggccttccagtttcaaatgagaatgcatggggctcatttagtatgttatataactctactgttttccaaggctgcttaataacaattgtttgcataaattaattgcgtaatttattgagtgcttacatgccagccactttgtgtttcagtcctaagccttttacattctgtaacctcaggaggtttagtactcttagtatcattctcactttataaatgagatcctgagacacagagagggtaattagctttctcctggtcacacagctagtaagcggtcaagctaaaatttgaatcctgggagtctcttgtgtcgacaatacttatccgctaagctgtatacctttgtgtgtgtgtgtgtgtatatatactgccctccttggcctcccaaagtgttggaattacagttgtgggccaccatgcctggccctctgtgtatattgaagccacctggttccatctatttatctctctctctctctctctctatatatatatatattttttttttttttttttttttttgagatggagtcttgctctgttgtccaggctggagtgcagtggtgccatcttgactcactgcaacctctgccttctgggttcaagcaattctcctgcctcagcctcccgaatacctaggactacaggcacacaccgccacgcctggctaattttttgtattttagtagaggcggggtttcaccgtgttgcccaggctggctgtgaactcctgagctcaggcaatccacctgcctcggcctcccaaagtgctgggattacaggcgtgagctactgtgcccggctttttttttttaaacgaatctcgctctgttgcccaggctggagagcagtggcatgatctcggctcactgaaacctccaagtcctgggttcaagcgattctcctgcctcagcccccagagtagctgggattacaggtacacgccaccactcccagctaattttgtatttttagtagagacagggtttcgccatgttggccaggctggtctcaaactcctgacctcaggtgatctgccctccttggcctcccaatgtgctggaattacaggtgtgggccaccatgcctggccctctgtgtatattgaagccacctggttccatctgtttatcaatgacctatatctccctattgcccttagaagtaaatctaagctcctcacctatgtccttttgccaagagcacaagtctcaacatatgccgtccccactgctgcctcctgcagactgaagttgtcttccctaccattcccagctccttgctgttctgagggtttccttccgaggaatccccttccatctctcagccatatggcaaaacctctatccactctttttttctttctgagacagggtcttgctctgtcacccaggctggagtgcagtggcacaatcttggttcactgcagccttgacttcccaggctcaagccatcctcccacctcagcctccccggtagctgagaccacaggcaagcaccaccagacctggctatttttttttttttttttgtatttttggtagagaaggggtctcatcatgttgcccaggctggtctcaaactcctgagctcaagcaatccgctgacctgagcctcccgaagtgctgagattgccggcatcagccaccacaccgggttctgtccactcttgagattcaacttacatgctccttccaccaggaagccttccctgagctcccaagcctgcatcagggtctagctaaatgcttccaccctaccctatactgccccccttagaccacactggtttacaggacaataccacataccagtgcttttcaaaatgtgtcctggggagctggaacatccctgagactcatttaggaagtccacaaggtcaaaggcatttttatcgtaatactaagatattttcctttttttcattcttattctctcatgagtgtatagagtctggaggcttcacaggaagtaagaacacgactgaacacagaagcagatatgagactgactttcttctgttgagtcaaacgttaaatctattttaaaaaatataaaccaataccattatataattttttaattttggaaactagttatttttattaaagtaagttgcttatgtaaatatacaataagctgattattttacttaaatacatattttagattttcttctcagtttgaattgcaaatatgcaaaatatcgatagacatagcacaaatttgaaaagctctttggggtcccctacaattttctttttttttaattttatttttagagacaagatcttgctctgttgcccaagctgaagtgcagtggggttatcatagctcattgcaaccttgaactcccaggttcaagcaatcctcccatctcagcctcctgagtagcaaatactacaggtgagcaccaccatgcccagctagtattttaatttttttttgtaaagatggagtctcaaactcacggcctcaaatgatcctctcacctcggtctcccgaagtgttgggactacaagtgtgagccaccagctctctacagttaagtgtacggagggatcctgcattcaaaggtttcaatgctaatgctgtatgtcacagagttagtaagatttacctaattcctctaatgactatgtagtggtccattgcagagaggtaatttatgtgaacaataaactcattttaattacgaatttatttatttatttattattcttaatttttaatttttttctattttaaatttttttctatttctataataaattgattaatttatttgagacggagtttcacttttgtcacccaggctagagtgcaatggcacgatctctgctcactgcaacctccgcctcccaggttcaagtgattctcttgtctcagcttcccaagtagctgggattacaggcatgtgctaccacgcccggctgattttttgtatttttagtagagatggggtttcaccatgttggccaggctggtctcaaacccctgacctcaggtgatctgcccgctttggcctcccaaagtgctggggttacaggagtgaggcaccgtgcctggccctgaaatgtaatactcagtcatgatttaaaagtttcagcatcagagaagggtataaagaaagtagcttttggctgggcatggtgactcacgtctgtaatcccagcactttggggggccaaggcgggtggatcacttgaggtaaggagtttgagaccagcctggccaacctagtgaaatcccatgacatagtctctactaaaaatacaaaattagccgggcgtggtggcacatgcctctgatcccagctacttgggaggctgaggcaggagaattgcttgaaccccgggaggcagaggttacagtgagccgagattcagcctcagcaacaagagtgaaactccgtctcaaaaaaaaaaaaaaaaaaaaaaaaagaaaaagaaaaagagaagaaaaaagaaagtagctttctcttcactcttctcaattccagcctcatttcccagagagagtgactgttcccactttcttcctttaggacagtggctctcaactggaagtcatgttgcccccaggttgcatttggcaatgtccagagatatttttgtttttgcttttttttgtttgtttgttttttgttttgagacggaatcttgctctgtcgcccaggctggagttcagtggctcagtctcggctcactgcaaactctgcctcccgggttcacgccattctcctgcctcagcctcccgagtagctgggactacaggcgcccgccaccacgcccggctaattttttgtatttttagtagagacggggtatcaccatgttatccaggatggtctcgatctcctgacctcgtgatccgcctgcctcggcctcccagagtgctgggattacaagcgtgagccaccgcgcccggctgtccagagatatttttggatgtcacaactcagggctggggggagtgaggtgctacgggaacctagcaagttctggaatagaccctgaaatgtgcaggaaggccacccatggcaaagaatcatctggtctccgatgtgactggtgcgacagtgattgagaaagcctgtgccagacttttatctagaaatcaataaatagaaatatctttatgaagatatttcttttgcggctgggcgcagtggcttacgcctgtaatcccagcactttgggaggccaaatcaggtggatcatgaggtcaggagttcgagaacagcctgaccaacatggtgaaaccctgtctctactaaaaatacaaaaaaaattagctgggggtggtggcgggcacctgtaaccccagctactcgggaggctgtggcagaagaatcatttgaacccgggaggcggaggttgcagtgagccaagatcacgccattgcactccagcctgggcaacagggcaagactccgtctaaaaaaaaaaaaaaaaaaaaaaaatatatatatatatatatatatatatatatatatatatatatatatatatttctttttttcttttttacctttatttttatggacacaaatgagtttttcctaaattgattcataagctgtgattctttttttaatttttattttgagacagggtctttctctgtcgcttgggctggatggagtgcagtggcatgaccttggctcactgcagcctcaacctcctgagctcaaggcatcctcccacctcagcttcctgaggagctaggactacactcctggttcattttttaagaattattttttggcctggcatggtggctcatccctgtaatcctagcactttgggaggccaaggcgggtggatcacctgaggtcaggagttcaagaccagcctggccaacatggtgaaacccccatctctactaaaaatacaaaaaattagccggatgtggtggcggacgcctgtaatcccagctactcaggaaactgaggcaggagattcacttgaacctgggaggtggaggttgcagtgagccaagatcgcgctactgtactccagcctgggcaataaaagcaaaactccatctcaaaaaaatatatatattttttgtagagtcgggggcctccctatgttgcccaggctgggctcaagcaatcctcccgcctcagcttcccgaagtgctgggattacaggcatgagccacggcgctctgccagctgtgataatctgcaggagattagggacctcttggagagtcagataaaagctacggacccccaggaaaaaaatacttatactcacaatattctgtacataatatcaggggcttcagtgacatcccattagctctggcagaatgccttggatgtgtgatttcgaatcacagtctcaacaagagagagatcactaacggtatccctcttccccttctacagatgagagaatgagagaaggaagctgcagtgagaatcaagctttggatccgggttccttggggaggcaaagaagagccggagttggaactccagccacctggctccccagcgttggaatatttccacttcaccctgaatgaggacgtttaagaaacgctgatcgacgcttcctggtacagcaggaagacatgccaccaccaccctgttcctcttgaggaaacacaaaggccccagctgttgttgatgagaaacactcgcgcacctgggaaaaaccacacactcaggatgtgaggcagggagaagggttggatagggacaagaggttggaactggctgcgtagagggtggagaccctagaatatgtatccactcattccctgactcattcattttctcattcattcgttcattcattcattcatttgttcatcatccctggacccgagggctcctgtccatcagggctgagctgggatctaggggacacggaagtaaatcagacccgtgcctgtccttgaacagctccggcaccagtgcggagaagaccgacccacatgtcaatcacaatatagccttgctgtggctttaaggagccagtgcaggcctggtgggagcactgatgtagaccctgatggaggcttgggaggtcagggaaggcttcctggaggaaggagcgtgtaagttgaatctcaagagtggatagtgccaggtgcagtggctctgtaatcccagcattttgggaggctgaggtgggcggatcgcttgagctcaggagtttgagaccagcctgggcaacatgacgagacccccttctctaccaaaaatacaaaaaaaaaaaaaaaaaaaaaaatagccgggtgtggtggtgcttgcctgtggtctcagctactggggaggaagaagtgggaggatggcttgagcctgggaagtcaaggctgcagtgaaccaagattccaccactgcactccagcctgggtgacagagcaagaccctgtctcagaaagaaaaaaagagtggatagagggtttgccatatggctgagatggaaggggattccacggaagaaaaccacccaggaaaccctcagaacaggaaggagctgggaatggtagggaagacaccttcagtctgcaggaggcagcaatgggggcggcatacgatgagacttgtgctcttggcaaaaggacataggtgaggagcttagatttactcctaagggcaatagggagacataggagaattttattttattttattttttattttttatttttttgagatggagtcttgctctgtcgcccaggctggagtgcagtggcgtgatcttggctcactgcaagctccgcctcccgggttcacacaattcttctgcctcagcctcccgagtagctgggactacaggcgcccgccacctcgcccggctatttttttttgaattttttagtagagacgggggttcatcgtgttagccaggatggtctcgatctcctgacctcgtgatccgcctgcctcagcctcccaaagtgctgggattacaggcatgagccaccgcgcccggccgagaattttatgttattattattttttgggagacggagtcttgctgttgcccaggctggaatatagtggcacagtcttggctcactgcaacctccgcctcccaggtttaagtgattcttctgccttagcctcccagggagctgggattacaggtgtgcggcagcacacctgtatttttagtagagacagggtttcactatgttggccaggctggtctcgaacccctggcctcaagtgatccgcctgccttggcctcccaaagtgctgggattacaggcgtgagccactgcgcctggtgagctctgggtctcacaaggctgaagttaagatgccggctggctgtgtcctctgctggggatttggctagggagagaactacttccaacctcccacaggttgagcagaattcatttccttgtagttgtttggctgaggtctctgttttctagttagcagttgccactcactctcaggtctttgccatgacaagacagtttgcttcctcagggttctcagcaactcctttgctttggttatttctgacgtcttgatcctttcctaagagatcacctgattaggccaggcccacctgggataatttcttttcttttctttctttttttttttgagacggagtctcactgttgcccaggttggagtgcagtggcgcgatctcggctcactgcaggctccgcacccccggggttcatgccattctcctgcctcagcctcccgagtagctgggacttcaggcacccgctaccttgcctggctaattttttgtatttttagtagagacggggtttcaccgtgttagccaggttggtctcaatctcctgacctcgtgatccgcccacctcagcctcccaaagtgctgggattacagacgtaagccactgcgcccagccggataatttcttttttaatgaagtcaactgattagggaccttaattatatttacaaaatcccataccttgccatataatgtcacataatcatggggactgcatcacctcctagtgacagctcttgtccacacccaagggaaggagattctcttgggtgtgtacaccaggcggtgggaatcttggaggttattttaaaattctgcctatcacagttggaagtgaggaccgaggaccttctcaagggaagggattagcaaacctatctctaagtctgcaggctctaggtctctgggtcaagcccagcagaggccttggctaatgtgaaatgaatatgtgagcaaatgtagaaatgagatcttataaaagtctacaacctgcttcttctgtgacaccccttctgaaggggccttccatgagctgaaggagtgatcagtgggttcaatactcccatccatctatctttctttctttctttctttcttttttttttgagacagagtctcactctgtcgcccaggctggagtgcagtggcatgatctcagctcactgcaagctccacctcctgggttcacgccattctcctgcctcagcctcccgagtagctgggacttcaggcgcctgccaccacgcccggctaattttttttattttttatttttaatagagacggggtttcaccgtgttagtcgggatggtctcgatctcctgacctcgtgatctgcccgccttggcctcccaaagtgctgggtttacaggcatgagccactgcgcccggctttttttttttttgagacagagtttcactcttgttgtccaggctggagtacagtggcacgatcttggctcactgcaacttccacctcccaggttcaagcgattctcctgcctcagcctcccaagtagctgggattacaggcgtgcaccaccatgcctagctaatttttgtatttttagtagagacggggtttcaccatgttggccagcctggtctcgaaatcacgacctcaggtgatctgcccgcctcggcctcccaaagtgctgggattacaggcgtggaccaccacacctggtaatactcccatctttcaaaatgaagtgaagagatgctatctcattccttaaactcattctacaagttcactgccaggtatgtgcccaagagatatgaaaacatatgtctacacaaaaatgtgcacacaaatgttcacagcagcattatttgtaataaccaaaatgtggaagaaactcaaatgttcattgatacatgaatgaataaataaaatgtggtatctcccgctataccatggaatgttattctgccataaaatggaatgaagcactggctcatgctacaacatggatgaaccttaaagacattacttacttagcctgaaagcagccagacacaaagaaccatacgttgtatgattcaatttctatgaaatgtctagaatgggaaaatctataccgacagaaagtacattagtgattgcctagggctggagtgggtgcttagattgggggtgatggctaaggagtacacagtatctccttggactaatgaaaatattctaaaagtgatctgaagttgatgattgcacagctctgtacaattaaaagccgttgaattgtacactttaagtgggtgaattgcatgatatgtgaattcgatctcaataaagctgtgaaaaaaagagatatactctttagttgttgaaataaatcatgatgtaatcatgcatcacttagtgtcacaaaattaccaatagaagaactaacacttgaggaagaagggaaggaaaagtgagggctgcatgaattgatttgttatctattagagaaaaaatatctataaataatgtataattttgattccaaaagaaaatcattatttagggatgtcaaggcaagtaagagaagaaatagctaagaatattaatagacggccgggtgtggtggctcatgcctgtaatcccagcactttgggaggccgaggcaggcagatcaagaggtcaggagatcaacaccatcctggccaacatggtgaaaccccatctctactaaaaatgtaaaaattagctgggcatgttgctgcatgtctgtaatcccagctactcgggaggctgaggcacaagaatggcctgaactcggcaggcagaagttgcagtgagccgagattgcgccattgcactccagcctggcgacagagtgagactccgtctcaagtaacaagaacaaaagcaaaaacaagaatgttaatagacttttccaataaggaaaaggacttgaggtggaacaggctaaattatttttattgtagtcccttgtgtaccatttgattttttttcttttctttttttaaaccatgagcctatattgattggactaggaaatatattttcatttaaaataaaataaagaggtttcccccagttgctagttcgtataatttaatagttctcaacaggggcgattttgttccccaagggacattgagcaatgtttggagacatttttggttgtccccaaatgctatttttagggtgctatttggaggtgctattggcatctagtggatagaggcgaggagtactgctcagcattctacaatgcacaggacagcctccaccacacaaaattatccagcccaaatgttgagaacgttgagattgggaaaccctggctttaaaaaattatcttcatagtcgttctcaccagtgcagttgtatcagcacaggctctggaatttgatgtcctgatgaatgtcctccaatacaactgacctctcaacctcagttttcacatctttaaagtggaggctgctaacagaacccacttcttttgaagatggaaccaataccctcaggctccttggagtctgtaatattaaatgcccagtttgtttttatttttatttttttcgagacggagtttcactcttgttgtccaggctggagtgcaacggttcgatctcagctcactgcagcctccacctccctggttccagtgactctcctgcctcagcctcccaagtagctgggattacaagcatgcaccaccatgcccggctaattttgtatttttagtagagacggggtttcaccatgttggtcaggctggtctcaaactcctgacctcaggtgatccgcccgcctcggcctcccaaattgctagggttacaggcatgagacactgcacccagcctaaatgtccagtttatattggttatcatcattgtttgctgatgtatctccccccgcatcccccagcaaaagagcagaaaataatcaactttcctcaaacgaatgaattccagaccccttcccttgggggctgtgtttcttagcttctaaaccaggagtgttggaatgcatgtctaaactttctcccatggggcggggtgagaattaagtgaaacgacctaaagaaatttcagtagaaatgtgagatgctggggactgaaagatatcgcccctccaaaggaaggaaccagcaggagcaaacactaggtaaatagatttagggaacacaggttattcctgtttctgccagcccccaggagggagcagtaaaggtgtgctgggttaaatgactatgaatttcacctattgttggccgccctccacccccataacccctattgtctcagagcctcaggttactcatggttaatgtaggaacattggtgcccacacggcaaagattctgtaggacttctgtaagacagcgaagcatgccaacagccttcaatcagccatggctactagttcttagtttctgataacatttttacgaggatcgggtcttgagtaaacggcttgcctagagccacgtgcaatcccacttcccatccgcgttctcacttggttggaggcagcttctgtgccctttataaccaagagcaactgagtatagaggagaagaagtgttttgtccaaggtcacacgaagccttgggagcatccgtgaaatttggacccaagaccgaactttcagactctgatctcagactttccacctccgattgttccacttccccaacctactagctagttctagaacggacagatccatgcttctcaaaactgttgcatagacccctacccagtcccagacaagtttctttaagacatatttgcacccaagcttttggcattctactctccttcccagccccagccccatctcgggggcatctaactctaccccttcttccccatcaggtttgaactaggggaggggagggggatgagaagagaaaagaaaaaattgttggtgaaagtcaaaaggcttgttaacgtggtaagttcaatattgttttatctggggtggtggggggggaatctttgccctcgccacttggaggaggagcggtgggaagaccccgggaagttgcgctttcccttggattttgggaaaggggagcattcctggggtccttttgaaaaggccctcccctcatttccggccgccgctgccagccttggctgggcgcctggatcctgttgctatgacgacaggaagaggcggtggcggcggcaagcgatgctgaagagagatggaggctagtgggggtgggggtggtggcattggaatgggggagggggcagggatccggggctggggacgcgggagggggcgggggcaggggtatccttcatctctgacctcctcggggcttctcagcctcacccctctcccgttattttttctgggcttccttcgggtgcatccccagtctctgtgtctgcctctgtttctctggatctctctctcttcctgtctcagtccctctccgtctgtctctctctgggtctccctcttttcctgcacttgcctttctttccccaggtaccttctgccatccaggcccttctaccctccatttctttcatttactatcttgctcccccgctccctctccgcatcttcttctctctttaaagcttccttctctctagcaagaccttgcccccatccccaatttctctccctacccgctctccatttcattccctctcccccctctctcccccatcctctcagtctctctctttctgtctgtctctccccatctgtccctcctccctcctctctggatgactctctccctctctcttctttccttctgtttcccagatcctgaccccccccacacacacacttaccccagccctcccccaccccctcccccccagcccctgcgtttctctctttgagtctctgtccctgtccccttctctctctggatatttctctgtgtgtatctctccaacttccttctgcttccagccgctgcctcccccaaatttctccctcccccatttctgtttcgcggtctctgggtctctctctttccgtttctcctcgtctctctctgtctctctccctccctctctggatctctctcttctcctccggcttccttctgccactcgaccctgcccccctctttcccttcccccatccatctcctctccgaggctccccatccctcagcagctcccctccccctccctccctactccctccctctcgtcctccagctccgcactttacccagcgacacgagaaccaaattgtctcctcaccttttttttttaatatatatatcccgaccctcactcccttggggcccaggctcagagctgccccccagccccagcctgacctcagcacccccattccccatacgcctcctcatctccactccccgaaccaggtcggacgcctgggtccctcactgctgggggagggggaagcagcgagaattgggagccaaaaggtttttctggggggggtgccaacagggggggctcgacgtcccctcctccgtgcatcggagagttgacctatcattaacagaggtgagacagatctttttattaatcggaggtgggtggaggtagaattaatgttctgtgatccccccccccgaattctggagaaaagagctggtccccttcctaaggagaaaggagagtgaccccctcatatccggaagctttagaattgggggtccccagctctcttctccctggcagctgctgaacgatggactaagagtccctaaaaccagattgtgccccaaattgacaaaatgaaaagatcttcgaatctttttttttttttttggacggaaggagaatttccctcctttccctcctcttcccttcccctcttatcccaggttgttaggggcctggggtcacaggcttaccccactgagagcagatatctgttaagacagggtaggtggccctgctggtggtgaggggcaccaattcggggagaagaggccaagagatcaagaagagaggaaactcagcatgcggacagaaaagagaggaaggggccggcgcccaggccgggaggctgggggttgccctgtccagcgggctgctgaactgtggcctgaggaagggctgtgtgtgggcagacgggagttgaggtgggggagggaacacaacgtgtggggcactaggcccagttgccatggagacaccccccatagacaacctttttccacagcccctcctcggagcagccccagtctgaggccagctgatggggggcagtggagacgggcaagcaatcaggaggccaaggtcaccctgtactgggacctaggttctggtttttgttttgtttttttttaatcccctcttcgtctaaggtttccaggctcttaactatagtgggtttgggggaagaagttgaagaagcagtgtggaagcaagtaaggagtacatcccccagaggacagttggggtgggggagacaggcagggctgggggcatggtggtcgggggagaatgtggaagagagaaatgaaggagccacggggcagcgggtgcaggctgggaaagtattcctaattgaaaagagagttgtagtcttgcggatcacatttttcagagggacacagtctactgggggggctctttctgcatgtggaagaagatgaggggctacagtgtgtgttcctgtacaggtgaagtcgtagaggggagtactggggggcgttcccaagaagggaagcctgtgggggcctgcggaggggattttccggggcagaggagaacctgggagctatagcggtggagcaagaggaagtgagtcaagggaattctatatgatgagagagaagttggggaggatgcttcctggtacattgaagagagagtgggcttcaaagtgagttagggggatctcaagttgggggaaacagtgtgctgaagatcccgtgtgatgatgaagggctacgaggaggggatttggaggcagtgggagctgctgtgagtgcagaggggcgggtgggtggtacagtgtgccccctgctatgggagtacagggcagagattggaatggtcctgagtggagagacatttggggtctggaggaagccattcttgcgagtagaaaatgccgtggaactcacggaggaaatttttcttaatggaggagaaaacgatggttatgatatgagttcgtttaagttgtgggggggggggtggcggggtgggaagattcagaaaactcttctaaagcaaaagagagggtgggggttttcctggagtaaaggcatagtatggggtggggagtgagtggcttgtggggagacagtgggggctgtgacagggaatgggctggagatggcggggggggggcagcttgcaaaccagtgggtctgatgttgggtgcattagaattccccagggagcttttaaaaacttacatgcgcaggccacactgcagaccaaccatgtcggactttctcaggtgggactcaaacatccgaatttttaaggtcctcgggtgatttccaggtgtgttggaggctgcccgaggcaggaagggggcttccagggagaggaggctgactgagggtggctggtgattccgagttgcacaaactgtgagggtcagctgggattttctttttctttttcttcttcttttaatttttcctttttagttgaagagaggttgagagatttattttttcctaaggagaggaaactgtgggggaccatttggagtgatggaatgacaaaagccagaccggagggggctcgcggaggttactcccacggaagtggtgctactcgggcttcttaagttgtggagacgctcagggaaaagttgggctgacagggaagggttctagcgggtggagaggtggggcttgcaggggaagagtggggagagctggtgggcgccgcatggtgatggggcgggggtcgctaaggaaggaagaacgcgacgggggctcctggggaggaggcggcggcgtggggcttggcatcatggcggggggtggcttcccatgcgatgaggatcgtggagccccctggggcggaggcggcgcgggctaggggcgagggctgtgagtgtgagcggtggtggggactcctccgagtggggttagtgggatggtgggacgactttcttgggcagaagacaggagtggagagagatttcatcttatttattaattattagcggtggtggggactcctccgagtggggttagtgggatggtgggacgactttcttgggcagaagacaggagtggagagagatttcatcttatttattaattattagcggtggtggggactcctccgagtggggttagtgggatggtgggacgactttcttgggcagaagacaggagtggagagagatttcatcttatttattaattattagcggtggtggggactcctccgagtggggttagtgggatggtgggatgactttcttgggcagaagacaagagtggagagagatttcatcttatttattaattattattattattattattattattattatttttgagaaagagaagcagtggagccccgagtggaaggagtttctggagctgaggcagggattttgggggggggggggcggggactgggggaggtacctgtgccttcttctcctctaatgcgagatctcgctccttgccctccaccagccgccgaccatggccgcgctctgaccccctccccggccgcagcctcctcctcgccgcccccctccccagccccgccggccccgggccccccgcttctgcctgcgctgtgaacccccccccagccgccggcacggccccgcccccgctgccccggtggtggcccacggccccccggctgcccgtggtcaaactggagtcgctgaagcgctggaacgaagagcggggcctctggtgcgagaagggggtgcaggtgctgctgacgacggtgggcgccttcgccgccttcggcctcatgaccatcgccatcagcactgactactggctctacacgcgcgccctcatctgcaacaccaccaacctcacggccggcggcgacgacgggaccccccaccgcgggggcggcggcgcctcggagaagaaggaccccggcggcctcacgcactcgggcctctggaggatctgctgcctggaaggtagggtgcgggcggccctccccgcagcccccgccgctcccctccgagagaccctgagcctcccggggctgcctgtccctgatcctggggcccccttgggcacccctcctcctctgccagaggggcttctgcgccttcccactcgcgcccctgacctcctctcccctccttcccactcctccctgcgtcctggcaccctgcggaattcctcggcatgctccctctgcagcccctctgcctctccgctgaacccccttatcctatctttccctagtccgtgtctcctgcgctgccccatcacacccctgcatcttccctctctccagtacctggggctcctcctgtttcatttcttccactctgccctgtgccttttctctttttttttttttttttgacaaggtctcactctgtcgcccaggctggagtacggtggcacaatcacagctcactgcagcctcgaatccctaggctcaagccatcctcccacctctgcctcctgagtagctgggaccacaggcatgagccactgtgcccagctaattttttttattatttgtagagatgaggtctcctgttgcccaggctggtctcgagctcctgagctcaagagatcctcctgccttggcctccaaagtgctgggatgaagggcatgagccactgcacccagcagcctctttctccctctttcccgtcagttcatcttgaccctgctcctccgctccacctgccccttcatttcctctccctcgtgccccgtgacatcttctctctcccgacatttcccccccagtcctctgaagtcccctgcctctcccgccccctttcacggcccagtcttccggtctgtctctttccccttctctttggctgctgctcccctgaaacttcgtgccttaactcgccctcactcatgactttctctcttttctgccttgtgcttctcctcctgttcatctttctcttcccatcagtgcccccacccatgtctctcccaccagggtgccctccaacctcccatcctggtcctttcctcctttttcctttagtggactccacttcctcttcctccactcatgcctccttcgacgtcttcctgactcgatgcctcaggccttcacgttaaggcttctcgctcctgcccctgctacctcctcggatcttcgacttggttcttttcctctgtcctgttctccctctcacagcttctctcctagctcggctccctggctctcgacttccccacttctccaagactcctgccctctgctgtgccaaccccttctctctcccactcttagcatcagtatttctttcctgagtatcaagtagctgcggggctgggaagcaggagtcttgggtgccagttctgctgcatatctgccctgctgtgtgaccactgtcttccctcctgcaccccagcctcacagcccttgtctgcaacgtgaaggagtggaaccagccatcctgatgcccccttcggccaaaagattgaaatctcttgcttctctttttcatccccctctatttcctctgccccttcttcctctgttttgctgagtgttcacgacaagccgggaacgttatctcgtttaatcctatgaggtgggcaccacctcgctgttggggatgggtaaactgaggctcagagaagtgaagtcacttgcccaaggtcacctagctgagaaaggggccgagccaagagcagaactcgaatctcatggatgggattcacagatgcgctctgtctagtgtacaaagtgtttaaaactgaaagcaaaatctgaatccattgccaacagttaaaaatagggaggcttcccattgtagttctgatttccggcttcttctgagctggcggaagatctagcacaagcctgtgttctaccctgaccacgatgggccggatctgagcagcagctggggggtctccacttccccacagtcacctccatctgctccgtctcgcctcccattcctcccacggctctcgtgatgttctttgcctctcctgtggaagtttgagttcatgtccattcactggtctgaccaagtaccaggcatagagccaagtgtgagggctcccatcatgggagccctaggacagcacgtggcatctagtagggatgtcattcattcattcattcgttcattcaacgtcccatttttattgagtttatattatgtgccaggcattgttctggattctggggctgcagcagtggaaaacaaacagacaaaacctcctgtcgttatatatcttatattctaagggagagacagataatgatggaggtaaagtcaacctttagggtgttagatagaactgagtgctaaggaggacaaggagttgggggaggggatgggaggggtcagggatccccgtgggaagtagataaggaatctaggaaaagcttccccgagcaggtgacatttgatcacaggtctgaaggaagtaagagatggaggaaagtgcttcagactgtaggaatagcaggcgcagaggccctgaggtgggagtgtggctgtgtgttgatcaagccagtgtgaggtcagcgtggccggggcagagtgggtggcggagaacgtaggagtaagaggtgcagtcgtaggggtatcagggtccccatcccacaggttctgttttttaaaaattatttatttatttatttatttattgaaacagagtcttgctttgtcacccaagctgtagtgcagtggcgtgatcttggcttactgcaacttcggcctcctgggttcaagcgattctcatacctcagcctcccgagtagctggaatcacaggtgtgtgccaccatgcccggctaatttttgtatttttagtagagacagggttttaccatgttggccaggctggtctcgaacttctgacctcaagtgattggcccgcctaggcctcccaaagtgctgggattacagatgtgagccaccatgcctggccagcttctgtgtttgtttttgttttgtttttctttttttgtttttaggcagggttttgctctgtcacccaggctggcgtgcagtggtaagaccatagctcactgcagccttgaacccctgaacccaagccgtcctcttgcctcagcctcccaaatagctagaactacaggcacatgcccccattttttgtagacacagggtctcactatattgcccaggctggtctcaaactcctgggctcaagcaatcctccggcctcagcctcccgatgtgttgggattacagatgtcagccactgcacccggcctcacggcttcttatacatcccagaaagcactttgctttagattcggagatgggagccgttgaaggttcttgagcagaggagtcacacgagctgacttacatttttgcggtatgtttcttgctgctgtgttaacaaatgaccgaggggaaggcaaatgagacaacgagaggctcatctagggtgggggcagcagggtttgggaagttgtttgaattttgagtatattctggagctaccgtgggcaggagttgctgatggagcagttgtaggatatgagagagaagagccaggggcgtctccaaagcagggtttttccaccgcagcatggttgatattttggggtggataattctgtgtggaggggccgtcctatgcattgtaggatgctgagcaacagccttgatctctcctactaggatgccagcagcgcccttcccagtcgtgacaaccaaaattgtaaattgtgtctaaacattgtcagctgtctcctgggggataaaatcgccctgagttgagaatcaccgctctaaggctttggcctgagctcctgagaataggggagccattcataagatgaaacagcagctgttttatttattttctcttatcaaatttattatgaaggagagggaccatgggctcagttttgggcatgttaaatttacgatgcccattaacagataacatctggacagaggtcagcacagtgaaggtcctataaagtgccatatagtaaagatttcaggctttgtggagcagtctctatcacgactactcgtgaaaacgaccaagacagtctgtaagtgagtgtggctgtgttccaatgagacttcatttatggacactaaaatctgaatttcactgggcgcagtggctcacacctgtaatcccagcactttgggaggccaaagcaggcggatcacctgaggtcaggagttcaagaccagcctggccaacatggtgaaaactggtctccactaaaaatacgaaaattagccaggcgtggtggcacgcgcctgtagtcccagctacttggtaggctgaggcaggagaatcgcttgaacccaggaggtggaggttgcagtgagccgagatcgcatcactgcactctagcctgggcaacagagagagactctaagaaaaaaaaacttttttttttgaattccatgtcattttcacatgccacaaaatcatcttcttctttgacattttctcaatcattaaaaacacataaaacccattcttagctggatttggcctgtgagccatagctggctgaccagtgatttaggctgctagagatatgatgtaggaggccagaggctgggctggagatatcagtttgaggggcatcatcatatagatgaatcagatggatggaatcacttagagaagagacagttgggtgcagtggctcacacctataatcccagcactttgggaggccaaggcaggaagatcacttgagcccaggagttcgagaccagccaggggaaaacagtgagaccttgtctctacaaataatttaaaaattagctggaagtgctggtgcgtgcctgtggtcccagctactcaggaggcttaggtgggaggattgcttaaacccaggaagtcgaggctaaagtgagacatgatcataccactacactccagtctgggcgacagggcaagaccccatctcaaaaaaaacaaaaaaaaaaagagagagaagagaccagaacaaatgataaaatgtccttatgtcattgaaggcttaagctttcggccagtctactattaaaatgtgagggagatggccgggcgcggtggctcacgcctgtaattccagcactttgggaggctgagacaggcggatcacgaggtcaggagttcgagaccagcctgaccaacatggtgaaaccctgtctctactaaaaatacaaaaattagccgggcgtggtggcgtgtacctataatcccagctactcgggaggctgaggcaggagaatccctttaaccctggaggtggaggtttgcagtgagctgagatcgtgccactgcactccagcttgggcaacagagtgagactctatctcaaaaaaaaaaaaaaaaaaaaaaagggagggaggtgagaagtcaccaaaggagtggagaaaggagtggccacaggtttggggaaaaacaggtccttggatgtcttggaagccaaaggaagttagcgtttcaaggagaggaggaatgaaggctgactctgttgttgttgtaattgtcattcatttgtcactgaatgcgcacaataaccctgcaaagtaggtactttatttatttatttttattaattttgttttcgagacagattcttgctctgtcacccaggctggagtgcagaggcgcgatctcaacccactgcaacctccacatcccgggttcaagcaattctcccgcctcagcctcctgagtagctgggattacaggtacccaccaccacacccggctaatttttgtacttttagtagagacggggtttcaccatgttgaccaggctgatctcaaactccggcctcaggtgatctgcccgccttggcctcccaaagttctgggattataggtgtaagccaccgcgcccagccggtacttttattattcccattctaaaagaagaagtgaagctcagagaggtgaagtgagttgcccaagatcacacagttaatatgcagtagggtctggatttgtttttgtttctgatttgtttacttttttttttttttttagagatgggtctcaccacattgcccagcctggtctagaactcctgggctcaagcaatcctctcacccccggcctctcaacgcattgggattacaggagtgagccaccctgcccggcccagcatctggatttgaatccaggtgtgtctggttttctaggagaatgaagcaacaaatccacttgctttcagcccatcggggctccaggggtgtagaaacggggtccccctgagtcattgcgtcctgcagccactgtgctcctgggaacccttgggctcaatctccatttccctttggagtgtgtctgagagatgcagtagaatgtaatgactgaaacaagctcggaggctgctctgcctaaggagcggccgttctttattcctttactgtctttaataaacttgctttcagctgggcgcggtggctcacacctgtaatcccagcactttgggaagccgaggcgggtggatcacctgaggccaggagttcgagaccagcctggtcaacatggcgaaaccctgtctctactaaatatacaaaaatattagccagggctggtggcaagcgcctgtaaccccaggtaatcaggaggctggcagggcgcggtggctcatgcctgtaatcccagcactttgggaggccgaggcgggcggatcacgaggtcaggagatcgagaccatcctggctaacacggtgaaaccccatctctactaaaaatacaaaaaattagccaggcgcagtggcgggcgcctgtggtcccagctacttgggaggctgaggcaggagaatcgcttgaacccaggaggcagaggttgcagtgagccgagatggcgccaccgcactacagcctggggaacagagtgagatcccagagtgagaaagaaaaaagaaatataacacaaggatgggccagtggctcacgccttgtaatcccagcactttgggaggctgaggtggacggatcacttgaggtcaggagttcgagtccagcctggcctatatggtgaaaccccgtctctactaaaaatacaaaaattagtcgggcgtagttgtgggtgcttgtagtcccagctactggggaggctgaggcaggagaatcgcttgaacccaggaggcggaggttgctgtgagctgagatggcgccaccgcactacagcctgggcaacagagtgagattccagagtgagaaagaaaaaggaaatataacacaaggatgggccactggctcacccctgtaatcccagcattttgggaggccgaggtgagaggattgcttgagtccaggagttcaagaccagcctgggcaacatagggagaccccgcctgtgtaaaaaattaaaaattagttgggcatggtgatacatgcctgtagtccccactactagggaggctgaggtagaaggattgcttgagcccagaaggtcgaggctgcagtgagctgtgattgtgccactgcactccagcctgggtgatagagcaagaccctatctcaaaaaaaaaaaaaaagaaaagaaaagaaaagaaaaaaagaaatataacatgggtgaccatatatagttaaaatttttaggctgggcacggtggctcacgcctgtaatcccagcactttgggaggccgaggtgggtggatcacgtgaggtcgggagttggagaccagcctggccaacatggtgaaaccccgtctctactaaaaaaacaaaatttagccaggtgcagtggtgggcaactgtaattccagctactcgggaggctgaggcaggagaattgcttgaactcgggaggtggagtttgcagtgagccaagattgtgccactgctctccagcctgggcaacagattgaggccctgtctcaaaaaaaaaaaaagaaaattaaaatttttctagtagctacattaaaataaataaaaaggaacaggtacccagcatagccaagatattatcacttgaacatgtaatcaatataaaaattattaatgaaatattatacatagacactctctctccctttttccccatcctgagtctgaaacccagtaaatattttaccctcacagaacctctccattgccacatttcaagtgttgggagctggaggcatctgcatgggacagcccagcttgtgccccctcctcagggatttcagccacaccccgaggtcttctctcaggactcaagagtctgggcccacagccctatttattagtgccgaccatacagagcccctttgctagcactttgccctgcttattatctcattaagccctcgccactttgccaggggaatgtattattagcaggaatctgatggccagaaaggggaagtggctcagcctggactacccagcatgtgaggggcagagtgggttggatcccagttctccacgtgtccgcactgcaagaaagctgccccttaacccttgcatgcccgggtctgcgctaggcagcccctgggaggagactcagggccatgacatcaccatccatgcacaagaaaaactcatagcttgatcggtggcattaagcataactactgtgaattctgtgcctaacttccttttttttcagacggagtctctctctgtcccccaggctggagtgcgctggagtgcactggcgtgatatcggctcactgcaaactccgctgcctgggttcaagcaattctcctgcctcagcctcctgagtagctgggattacaggcacccatcaccacgctgggctactttttgtatttttcagtagagacagggtttcaccatgttggccaggatggtcttgaactcctgacctcaggtgatctgcccacctcgccctcacaaagtgctgggattacagctgtgagccactgcgcctggtcttctgtgcctttctttcttgcttgctttctttcttttttttttctttcttctcttttcttcttttctttttttttttttttttgagacagagtttcactcttgtcgcccaggctggagtgcaatggtgtgatctctgctcactgaaacctccacctcccaggttcaagcaattctcctgtctcagcctcccgagtagttgggattataggcacctgccaccatgcctggctaatttttgtatttttagaagagacagggtttcaccacattggccaggctggtctcgaactcctgacctcaggtgatccacccgctttggcctcccaaagtgctgggattacaggcgtgagccaccgcgcctgggcttctgtgcctaactttcactgaaatttcactgaagccctctaaagtcacactaccatcctcaatttcccaatgagagagcagaggctcagggacgatccggttccaaaaccacgcagctgggaagtggtacgttgggatgtgtgtccagagagttggattccagagcccacgatcaataacccccacagccaccagactctactgtcttaaatatgctgaactcccaaaccgagctgtgctggaaggaacctctccccatcactcacccccaatagggctttgggcaacttcttcaactccctatgcctccatttcctcatttgtaaagcaaggatgctgtcactgcctacctccgagggtttgtcctagggactgagcaagttattaaccacctgtcaaatgcttggagcagtacctggtgcacggttagtgctcagtcagaactagttattattactgtcaccactaacctgttcagcaatccggtgtgccatgtggtttacatgctcagtctcatttaatcatcacgaatattttgagagaattactatgatcccattcaagaaaggagggaccaggctgggcgcggtggctcatgcctgtaatcccagcactttgggaggctgacgtgggtggatcacctgaggccaggagttcgagaccagcctggctaacatggtgaaaccccatctctacttaacatacaaaaaattagccaggggtggtggcaggtgcccgtaatcccaggtacttgggaggctgaggcaggagaatcatttgaacctgggagggggagtttgcagtgagccgagattgtgccaatgcactccagcctgggaaacagagtgagactctatctcttaaaaaaaataaataaataaaaactggacaagatggcttacccctgtactcccagcactttggaaggccgaggcaggaggatcgcctgaggtcgggagatcgagaccatcctggctaacacagtgaaaccccgtctctactaaaaatacaaaaattagctgggcatggtggcacacgcctgtaatcccagctactcaggagctgaggcaagagaatggcttgaacccaggaggtggaagttgcagtgagccgaaatcgagccattgcactccagcctggtcgacagagtgagactccatcccaaaaaaaaagaaagaaaggagggacattgagcttgtcatcttacctaccacaccatggtggaggtgctgatgggttaagagtttgtatgtgggagttgtatattcattcactcattcactcattcattcgttcattcattttgataattgtagtaaattatacataacataaatttaccatcttcatcatttttaagtatgcatttcagtagtggtaagtgcaaccaatttccagaactcttttcgtcttgcaaaatggaaactcagtacccgttaaataactccacatccccccaccctccagccctggcaactaccatgacactttgtctctatgaatttgattattccaggaatttcatataagtggaatgacacagtatttgtctttttgttactggcttatttcactgagtataatgtcttcaaggtttatctatgtttatagcatgtatcagaatttgcttccctttgaaggctgaataatattccattgtatgtacatagcacatgttgtttatcctttcatctgtcaacgggcactggggtgtttccgctttttggctattgtgaaaaatgctactatgaacacgagtgtatgaatatctatttgagtgcctgcttttaattcttttgggtctatcaccagtactggcattgctggatcatatgatgattctatttgtagtttttgaggaacctcgacactgtttcccatagccactgcaccattttatatttctaccaacagtgcacaaggttccaatttctccacatccttcataacacgtgttattttatttatttatttatttatttaatttatttatttttgagacagagtctcgctctgtcacccaggctggagtgcagtggcatgatcttggctcactgcaacctccacctcctgggttcaagcgattctcctgcctcagcctcccaagtagctgggactataggcacacaccaccatgcccagctaatttttgtatttttagtagagacagggtttcaccatgttggccaggatggtctcgatctcttgaccacgtgatccgcccacctcggcctctcaaagtgctgggattactgacgtgagctaccgcacccagcctattttattttatttttttatttatttagagatggaatcttgctctgtcaccaggctggagtgcagtggcgctatcttggctcactgcaacctccacctcccggcttcaagtgattctcctgcctcagcctccctagtagctgggactacaggtgcacaccaccatgcccagctaatttttgtgtttttagtagagacggggtttcactatgttggccaggatggtctcgattctcttgaccttgtgatccacccacctcagcctcccaaaatgctgggatcacaggcgtgagctcctgcgcctggcctattttgcttatttttaatagtaaccatactaacgaatatgaggtggtatctcactgtggttttgattgcatttccccaatgattagtgaaattgagcatcttttcatgtgcttgtggacccattcaatcattctttttttttcttttttgagactgagtctcgctctctcgcccaggctggagtgcagtggcgcgatctcagcgcgctgcaacctcctcttcccagattcaagcaattcacctgcctcaggctcccaagtagctgggactacaagcgtatgcccccacacccggctaacttttgtatttttagtagtgatggggttttaccatgttggccaggctggtctcaaactcctgacctcaggtgatccacccacttggtctcccaaatggctacgattacagacgtgagccaccacacctggcccattcaaccattctctcattaaaaatacttattaagcactcaatatgcactaggcactgttctagatgctggtaatacagtgtcgaacagcccagatgctcacattcatgatgtgtgtttgagttttgttgccaccatcagctgcgaaatgatgacccttttctgtttctcagtttccacgtttgggtaatgggtgctatacatcagctgctatcaaccgagtacttaattgtgttcaaggccaagtgctaaatctccacctagacccaatccctcatatcagtcccatgaggtaggtcctgttctctgcattttataggtggggaaactgaagcaagctggcctatgtaacaccagcaaggacacagaataaggaagtggtggaggccagcgcagtggctcatgcctgtagtcccagcacttttggaggctgaggcgggcggatcacttgaagtcaggagttcaagaccagcctgggcaaagtgggcaacatggggaaaccctgtctatacagaaaatgcaatatttagctgggcatggtggcgcaagcctgtagtcccagctactcaggaggctgaggcaggaggaccacttgagcccaggaggtggaggttgcagtgagccgagattgtgccactgcactccaaacttgggcaacagagggagaccctgtctcaaagaataaaaaaaatggagacgttccaatacctaacatttggctgccacagcacacaaaccacatgatctatttcataggactcttgggagcatcaaatgagttggcccacctagcaagcaccaaacgcacattagctcttgccagtattactcactcccttatattaattcttcccagttcctcctttatccctattctttcccctactttcctttgctggtcatggtctgcctgtgatctcaccttctgctatgcttatattcattcattaattcattcattcattcttcattcaaccctcatttctttctctctctcttttttttttcttttgagacggagtctcgctttgtcacccaggctggagtgtaatggtgcagccttggctcactgcaacctccacctcctgggttcaagtggttctcctgcctcagcctcccgagtagctgggattacaggcacccgccaccatgcccagctaatttttgtatttttagtagagatagggtttcaccatgttggtcaggctggtcttgaactcccgacctcaagtgatccacccgccttggcctcccaaagtgcagggattacaggtgtgagccaccgtgcccggcctcagcccttatttcttgaggtctcccgtgtgccaggcctactgccaagaaatgctgggacacacagaggaatcggactcccatgccctaccccctccaggaactctcagcttaccgaggacgaagaagatcatctaccaactaatgcatgtcctacggggcacctcagagcaggaaactgacccaagttcggtgggaggaatgagtgtgcatgtgtgtctgtgtgtgtctagggaaagcctcctcaagaaggtgcctcctgagctgcctgctgcaggtaaagtactacatcagcaaagaatgtgagctggaatgttccacagcatgggcagaggtctgcagaactggacagagctgggcagttgaggaaactacattgtttatacttatatttttaatttttttctccagctatgtgctagaggtggtaaaacattaactgttcccaaggatgagaaaatagctgaggatgagcatcttaggaggggaaggagatgaggatgcatgacccctagaggcatactccacccctcacacacctctgcttgcttcaactactccatttctctccagaaggttccaggttccctgcagaaagagactggaacctctctctccccatccccacaggactagagactacaactcccatgatccactgcggctgctcttctcacaactggactccagacttcacggggtctcatgggaaatgtagtcctcatcggcttccgcatcactttccttgttttttttcccacgcatttccagacttttcaaccaattgagaggtgggaagcgccttgctattattgaagccaacaacaccctctttcttacagaggtgggagccggaagtccagagtgctggagcaacttagcgcagcttacaggaccaaggtcctgtagccttgcagtgagtgctgcaaggatgttagactttgggtttttttccttgcttttcttcttttctttaacaggcggggaaacagaccagagaagttgaaagtttgtcccatatcacgagtcgggctcaggagccaggacttgcggtctcccaagcagcccagagagagaaggggtttggggaagggaagggtcggttgtcagtggggttgccccgcccccaaccctgaagtatccgcccccaccactgccctccccgctcctccagggttgaaaagaggcgtctgcgtgaagatcaatcatttcccggaggacacggactacgaccacgacagcgcggagtatctactccgtacgtgggggtccgggacagacgtggggagtgggtcaaatcgcggggcctggaaggcgtcggggtgggtgccgggaaaaggcactgggactccggcacttggatcgacacgccgaggttagcctcccagccaatccgagtccagatagtgagatcctctggtccccgattggctgactgatctcgttcccgccccctcctctcaccttggggcgggctgagggaggatcctgggcgctaattggccgctttgctctctttggccctcgcggcgactctgcgccgtgactggttgtggaatcccggactgggattggccaccgcgccgcagagctgtggggcaatctgcggcggtgacgggccactactgggagccggctgggaaagcctgtattgccattggtagctaccccgagaacgcggcaaatcctaaatgatgattggctgcggcctcagccaggttccgaaatcgcaaaatctagttgcctggggttttaggggtgggtggaaaggaaggactgcagagaaaaagaggagggcggggcggggagtgggggcggggagagagagataaggggaagaagggagggaggaaaagagggagaaagagagatagacgaagtcaggcctaaagggggtagggagggagggaaggaggaagggagaggaagggagtgaagagaagagaaacctggaagattgaagaaaccaggcagaaaaggaggggagagagagacccaggaagatagaggaggccaggcgaaaaaaggggtggggtggggtggggtggggaaagacctaggaagacagatgaggccaggcagaaaaaaaaagaggggggagagacctaggaagataggtgaagccagacagaaaaagttgtgggtgggggtggctaggaagacagatgaggccagggagaaaaagtgggagagagacttaggaagacagatgaggccaggcagaaaaagcggggtggggggggacctatgaagacatacgaggccaagcagataagaggagagaggggagacagagccagaaagatagatgaagccagcaataaaactgggtggggtgggggcgtgaggagaagaagggaagagaaactcagaagtagattcagcctggcagaaacgggaggaggaggaggaaggaaggaatgtagagagagagagaaacccagatagatgaagcgaggcagaaaatgggagggggtgtggagagaggtagtaagtgatttgcgggatatggagaaagaaattcgcagacgagaggaaggaagggacgagaaagagaaagggagaggatccatggagaagttgggagaaaaacagggagagtgatttcgataaataaagagggggaaagatattccaagagagagaaaaatagtccgaagaaaaaagaaaaggacaaagaaaaagagggagagaaaatcagaccgagaaatagagaaattttaaaaacaggagagagaatgaggcaacagtaaaataaaccagaacacagccggagagagagaatcacagaactgtcgggaggcgccgcgagatggggggccgggaagggggcgcaggcggccgcgtctgaccgccctcgctctccctccttttcctttccttcctcccccgcaggagttgtccgggcctccagcatcttccccatccttagcgccatcctgctgctgctcgggggtgtgtgcgtggcggcctcccgcgtctacaagtccaagaggaacatcattctgggcgcagggatcctgttcgtggcagcaggtgagaggcagagggagggggcgaccggggcggcccacctgggcgcgcacgtgtgtgtgtgtgtgtgtgtgtgtgtgtgcgcgcgcgcgcgtgagtgcaagtgcgcgttcgtgtgtctgcaaagccaccttgccccgagcacccccgggggcccggagccttcctaggcggtccccaagctccatcgccacccgctgggtaaggtgggtgtagttctcgcgtcgccttcggaggagtaaaccgacacaggcaggtgtctggcgcgtaagacgccgggcgcttaggatcccaagcccgccgtcctggagacggaaggggaggagctggggagggggtgggaccttgagacacaattgggctcttgaggatagagaggcggggctgggtcttggagggcgggcccaggagaggtagaaagtgatctgagcgccgatgaggagcctgctttaaggggcgggcctttggagactttggtggatccaagagggggctggtcctgggaaaccgtccagggccgggaagtggaaactaaaggggctgggtaagggagactgaatcggcccttgcccgtggccatttggagaaggagaggctagaaaagacggggcgatgcctggaaaagccaaagggggaggggttatgtccttaagggcacagagaatcaacctggctgattgaagcaagaggccgaccaaagccagtcagtacctgggattggccgtctcaagagctagggcctagacgagcagagagctaggactggaacacttaagaggcacgcaattaaggggtaaggccccctttctaccccgtatgagtagcattgggaaattccaggggcagagcttttttggaggagtagaatacagagaagagggagggctttgcatatttgaagagcagggtgtgctttggggatgggtctagatctgcaaggggtggggcttggaggatctgaaaggccggagtagctggacctgagaccggcaaggacccgagaccggcaaggaccctggccaagatccgcacggggcggggtttggtaagctggaggtggggcctagagtagaaggcggggcctgctttattaaaggcaaatttttgaccagtaggggagggcctagaatggatactccggcaggaattatatgaagagagattagataagtgaaaggcagggcctgatcacagcaggatgacatcattaacagagttcaaaggagcagagggatgaggcttgggaaaaacccaggtttataacgttaagggtggaggtagactaactagggcagggcctggaaactcatctcatcaaaggtgggttttagaccagtcagggcagggcctggactcgctgggagtggggcttaggccacctaggggtggggcctggaccgcttggggtggagttaccaccagccagggtggggtttagaccagcagagttgggaccttagctagaggagtggggtttatgccatgtgggggcagcccagaccatctgggggtgggtcctagaccacctggggcagagtttagaccagccagggctgggttagaccggcagaggtgggccgtgggctatctgggggcaggacctggaccatccagggccgtgtctggaccattcagggcagggcctggaccacctgggggtggaatttagaccatctgagggggtgcttgagcctgcctgggccaggaccacgcatgatgcagtctggaccattggcggccctacaccacctgggggatggagtttcgaccagccggggttggattagaccagcagaggtgaggcctgggccagctaagagtgggccggagccctctgggttggagcttagaccagcagggaagcgcctagagcatcgggcggggagttgtgttcacttctggcaggacttgggtcagccagatccaggacgggggtctagaccactcggggtggggcctagaccgcctgggggtggcgcctgggcccgctggcgcaggcgggcaggggtcggggccgggggcgggggcggggccgggggtggcctcgaggctcccgtctgaccgtccccgcccaggcctgagcaacatcatcggcgtgatcgtgtacatctccgccaacgcgggcgagccgggcccgaagcgggacgaggagaagaaaaaccactactcgtacggctggtccttctacttcggcgggctgtcgttcatcctggccgaggtgataggcgtgctggccgtcaacatctacatcgagcgcagccgcgaggcgcactgccagtctcgctcggacctgctcaaggccggcgggggcgcgggcggcagtggcgggagcggcccctcggccatcctccgtctgcccagttaccgcttccgctaccgccgccgctcccgctctagctcccgctccagcgagccgtcgccgtcgcgggacgcgtctcccggcggccccgggggcccgggctttgcctccacggacatctccatgtacacgctcagccgcgacccctccaagggcagcgtggccgcggggctggcgggggccggcggcggcggcggcggcgccgtgggggcgttcggcggcgcggccgggggcgccgggggcggcggcggaggcggcggcggggcgggtgccgagcgggaccgcgggggggcgtccggcttcctcacgctgcacaacgccttccccaaggaggcgggcggcggcgtcacggtcacggtcaccgggccgcccgccccgcccgcgcccgcgccacccgcgccctctgcgcccgcccccgggaccctggccaaggaggccgccgcctccaacaccaacacgctcaacaggaaaaccacgcctgtgtaggggcgcggcgggggagccgaggggcgtgtccggggcgcgtgcgcgggcgcgcgtgcatcgaggctgccggggtcgggggcgcccccgctttcccccgtgagcgcgctggagactgctgggcccgccccacgcccaccctccccgcccccctccccctccgaagcagggaccccgagggagggggcaggggagggagggggccgctgtgagggagcgtcgtgttttatttttttgggggatctatggggaggggggagggccatggtgttttttgcagtttcgagatgttttctttttcatgttttgctgtgtgcatggggggcggggcggggggaggggagggagggactcccagcccagcccaactcctggagaggggcccataatacacgaatacatagttacacccacaaactatatatatgccctatataaagagacacagcgaagggatgcagaaaggcagaaagaagggttggacgcgggcattcattcatttttttcattcattattccacaagggcttattaagcacctactgtgtaccaggcactggtacataagaaggcattggagcaggggacacgaacgaggcacagaaagggccttctcattcattcattcattaccggcaatttatttgtgcgccttaaaaagctaggcattgtgctccgtgctcagcgtgcaggaggcaggaaaacagccaggggccccgacgtctcatagagtaaacatcttgtgcatgagacaggcattaatcgatcatgtacatacacaataaattacagttaggctataggagaaacgagatgctatgaaatgctccatcaggggagcctaacccagttgtgaggaagagatttcagtggacagtgaaaggatgagaagaagccagcagggcggagctggggcaggagtgtggcaggcagagcagcacgtgcaaaggccccggggcaggaaggagcttgcagcgagggctgaagggtagtgaggcaggtgagcggggatcaaggtgaggccggagacacagacagggccagattgtgcaggggctcgtaggtcaggagttcagattttattctaggagtggtgagggccgtggaacgggtttaagcaggacgctaacgtgaatggtgtacaaagggaagacaggaactcggaggcaagagtaggaggcagagatgtgctgaaatacagcatcaaacatgggcacgggcccttggagctcacactcttgtgggaggaagcacgtaattacacagatgctgaagcatagtcatggtgtctggtgtgcaggagaaagccgtggggcttagagactcatgtgtctgtcactcgttcattcagccactcacccattgccatttttggccatctgctaaggtaccaggaagtgtgttaggatccagatccccaggggtgaaacagactctagccctgctctcaagcagtttattgtcatcaaacaccgccatccaggcagggcaatcggtgctggaacccggaccaccgtgggtaccgtggcacacggtggacagagtgaccaactgccaggagtgagcagcacttggggtaggcttcctggagaatatgatgcccattctgggtcttgaagaaatgagtgggcatcttctggttgatgaaaggcatgagaaaggcttgtggggccaaagaacaacttgggtgaaaacgggaggaagtgaacgagcatgatgtattggggtcagtgctaacagttctgggatgctgatgtacaaggtggggctgggagatgaggccgggaaagtagccacaagctagagtgtaaaggtaccagggtggccgggcgcggtggctcatgcctgtaatcccagcgctttgggaggctgaggctggagtatcacttgagcccaggagtttgagaccagcctggataacatggcgaaaccctgtctctacaaaacattaaaaaaaattagccgggcgtggtggagcacacctgtggacacagctactcaggaggctgagggaggaggaccatttgactccaagagttcgaggctgcagtgagctaggatcgcggcactacactccagcctgagcaacagactgagatcctgtctcagaaaaaaagagaaaaaggtgcctgagttccaggcagagggactgaggctcttctaaggatggtgagagaggatgacagctgcgcgggggcaagggctgtgcggtgattggaggggatgggtttgaagttcactgagaaggcagaggggacagcgcccagtaggcttcccttccatatttgctcagcaagtgtttcctgaggcctcccccgaagccttgtgctgggcggtgctgggagtggagaggtgattttgatcttgccctgctctcaaggggctcccagtctggcgggaaaacaggcacagacgcagcttgaggaggacgtggcagcggtggtgccatgctgccaggggctctgcgtgcccttctcttgacggaagggtacagatcagagctgggtgttcagaatttctctccgaggcctgtgtggaaggaccaggaagagagagactgaaggtccctaggaagaattctgccaaggcggtttcaggaagagatgctgggaaatgtaggaaaaggaatacaaatcagtgagacggagaagcgctgagtgagagagacggatacgtggagagaagagggatgccggagcgggtgttaaaagagacaaatctggccgggtgctgtggctcctaatcccagcactttgggagactgaggcaggcagattgagctcaggagttccagaccagccaacatattgaaatcttgtctctaccaaaaatacaaaaattagccgggtgtggtggtgcacgcctgtagtcccggctactcaggaggctgaggtgaaaggatctcgcttgggcctgggagggtgaggctgcagtgacccgtgatggcaccactgcgctccagcctgggcgaaagagcgagactctgtctcaaaaaaaaaaaaaaaattgagagacagcaaatatttgctggaagagggagagggaactggttaggggagaatggattctagagtctgaaggccaaacagaacgagagagagagagagagagagagaaagaatgaggttgagggtaggcaggaggaagagcaagatggggagggagggggagagcaggagagaccaaactagtagagtcacagacagagaaaaagtcaaagacaggaaggtgatacagaggagagagaagaggaagaggagagactgacaggtgcacaaatcagagaagtcccagagatagcagaaacacacacagagacagagatagagagggagaggtaagccggagacagactcagagattcgcacaaaaagcaacgtggagactcagaagcaagcgcagcgtcaaggaatgctccatttctggtgtgttgttttcccagtattcaagaaatatttattgagtgccaacctgttctagacccaatctcggccaggggatgtggtggcaaatagacggacaagggcctgctctcctgaaacacactggagagataaacaataaataatatcatttcagtaaccaaaaagtgctttaaaaattaagctgaaggccgggcgcagtggctcatgcctgtaatcccagcactttgggaggccgaggctggtggatcacttgaggtcaggagttcgagaccagcctggtcaacatggtgaaacttcatctctaccaataaataaataaagtagctgggtgtgctggtgtgcctgtagtcccagctacttgggaggctgagaaagaaggatcacttgaacccaggaggcagaggttgcagtgagctgagatcgcgccactgcactccagcctgggcgacagtgagtggtaacagaatgacagagcaaggatgactttagatgaggtccttggagtagaccttgtggcagaggtcacagagatgtggattgtgagtaggaaagagaggtgagaaagtctgggggccaggcattccacccaccagaggcagccccaaagcccagaaaagtagcaggtcttcgaggaggcctgtgcggtgagcagatccaccataggacagaggcacagggtaggggctgatcagttagggccttggatccttgggaagaaatctgaattttattctagatctgatgggaagtgcttggagggttttgagcacaggcatgccatgatcatatttttattttcttatttatatttattttgaaaaagagtcttgctctgtctcaggctggagtccagtgggctgatctcggctcactgccaacctccgcctcccaagttcaagtgattctcctgcctcagcctcctgagtagctgggattacaggcatgtgccaccacgcctggctaatttttttgtatttttagtaaagacgggatttcaccgtgttggccaggccaatctgaaattcctggcttcaaatgatccacctgcctcggcctcccaaaatgctgggattacaggagtgagccactgcgcccggcctcatatttttatttaaacaagaacagcagaattacattgctgtgctgagcatacgtagacttcaggagtcaaaggggaaggaaggaggtagcgggctgttgccttcctctggttgctggaggcctggaccaaggtggagttagtgggatggaggaagtggaagaaggcatgggattttggaggctagagcctgcattggtggtgaactggatgtcatagaggagggaaggaaaaggaaccaggaagagaagaactctctgaattgggcacgcacatctctgatgggcaccgatgaggattgttaccaggaacgaggagactgggatcaggaaagtggctttgggagggaggaaccaaggcttctcttttggatgtgtcaagatagatctgccttcgagaaatccgagttgtggtatcaaatagccagttggatatgtgagactggagtttgggggaaagagaggccgtggctcaaaaacgtaagttttggaaacgtcaacataaagccacaggattgggtgacgtggcctagcaggggggtggggacagagaagcgaccctggccagagccttggggacatctacatctgggggagaaggggatgtagcaaaacgagcttaggagtgatctcgaggtaggctgaaaccaggagggttacagagggcaaatgcacctttgtgtttcaagaaggagaggagacagccagctgtgccaagggctgctgagacttggacaaggatgcagagagcagagtgaccattaggtctgatgacatggacagggttggtgatcttgataagataagatgtcagttcagtgcagtggtggggacagaagccctgctggagtggaggggagagagaatttggggggaagacagaaggaaagggaattcaggcaagtgtgtgtgtgtgtgtgtgtgtgtgtgtgtgtgtaactgacacaaaggccaggtgcgatggctcacgtgtgtaatcccagcactttgggaggccgaagtgggtggatcacttgaggtcaggagttcgagaccagcctggccaatatggtgaaaccccgtctctactaaaaatacagaaattagacaggtgcggtggtgcacacctgtaatcccagctacttgagaggctgaagcaggagaatctcttgggcccaggaggcagaggttgcagtgagccaagatcacaccactgcactctagcctgggtgacagagcaagactctgtctcaaaaaagaaaaaaggtaaaaaaaaaaaaaaatgaccctgaaaggaagtagggagacatgcagatagggagatgggaggcagaaaattgcatcctgcaattagctgtcacagcaggcaggagcaagagagatggggaagcccagggccaggaggggaagatgaattcagggggcagggaagagaggatgctgtcagctaggctctggcagatcccctagccagggatgctctgcccagctcctgtctcttgctgctgtcagcgccgggcacactctgggattccccctgtagaccctgtcaagacctattgaggtgaaggggaagaacacgttttcatcattcattttcagaaataaacattcactcagttcttggaaatactttctggccaggcttgggggctcatgcctgtaatcccagcactctgggaggccaagacaggaggattgcttgaggcttggcgtttgagaccagcctgggcaatatagtaagaccccgtctctacaaaaatgaaaaatgagctgtggcgtggtggctcacgcctgtagtcctagatactcgggaggctgaggcgggaggattgcttgagtccaggagtttaaggttgcagtgagctatgattgcaccattgcacttcaggctgggccacagagcaagaccctgtctcagaaaacagaaagaaagaaagtcaaagaaataaagtcaaagacaagaaggtgatacagagaagacagaaaaggaggaggagagagactgacaggtacacaaatcagagaagtcccagagataacaaaaacacaaccacagagatagggagacgtaagccggagaaagacccagagattcgcatagaaagcaacgtggagactcagaagcaagcacagcatcaaggaatgatcaataaaaagaaaaaaaaatatttcctgaggacttccaagtacaaggccctgcaatctcaggccacttctgtcccatctctgccttcagagggggggacaggtagtccagacaattagaatacagagggggctgtgttctgacggggccacgcgggcattgaggaaacgcagcaggcccctcccctagctggggcggggatgtctgtgtgccatcatctcactccatctggtcattcctttgcccattcatccatccattcattcaagtcaccccatgcacattttccaagactgcctgtgacctggccctgtgccgggtagagctgaggatgccaaggtgaattcctcctgtgcctggccccggccccagtctgctggaagaaccagacacagacaatcacactgcggggaaacacgtgctccatcggaaaagtccagagcagggggtgggcagagaggcccagcgtgcaccagagcctcgctcaggtcagcgccaggcctgcctggagcagccaactgtgggagaagaaggagttggtgaaaggtgggtcccacctgggccgtccacagaagggctgaggggtagggggtgaggggttgaagatcaggccctgccgccatgccacacggctgtcctctgtccctgctcctgggggagctgaaactgcatggaaggtcccccaggggtgccccgtctaataaactcgatgaagaggagtgctgctttcattctgtgcccctgacagccggccctgccctgaggcctgcgctttctccaacatggaaatcaggccttccatccttcaagacccagggttctggccccagtctcctccctgaggcccaggactctgggtctgccaacgccttgaccaggagtccaggctccccggccctcctcctccctcagacccaggagtccaggcccagcccctcctccctcagatccaggagtccaggccccctgccccctcctccctcagacccaggagtccaggcccaggccttcctccctcagacccaggagcccaggcccccagcccctcctccctcagacccaggagcccaggcccccagcccctcctccctcagacccaggagcccaggcccccagcccctcctccctcagacccaggagtccaggcccccagcccctcctccttcagacccaggagttcaggccccagtccctcctccctcagacccagaagtccaggcccccagcccctcctccctcagactcaggagcccaggcccccagcccctcctccctcagacccaggagtccaggccccagcccctcctccctcagacccaggagtccagacccccagcccctcctccctcagacccaggagcccaggcccccaacccctcctccctcagacccaggagtccaggcccccagcccctcctccctcagacccaggagtccaggcccccagcccctcctccttcagacccaggagttcaggccccagtccctcctccctcagacccagaagtccaggccccagtccctcctccctcagactcaggagcccaggcccagcccctcctccctcagacccaggagtccagaccccagcccctcctccctcagacccaggagttcaggcccccagcccctcctccctcagactcaggagcccaggacctaggagaccaggttcctctcctctcagatccaagattctgggtacccaggccttcttcctctaccactcagaagtggggtaccgaggcttcttctcccttagggacccaagactcctggcctcaggccctcctccctgagacccggggccctgcctcccgcccctcctccctggtaaccccagtcagacttgctgccccgcccgtctcctgctgcccgggagactgcggagctgggactctcggcgccgctcttgccccttagtgaaatgaaagtcccatcaggctcggccccttcctccccgggcggcctccctccccccttcctcgtccccttaaaacacccgggatccctatggcaacaggcgccgggcgacaggtgcgggtgttatttacgggtcaagcccgaaatagccccgagggtggagggtggagggtggggggtgggcgggtggggacgaggccgggcgcgggcggaggccaggccggtggcggtggcgggcacagccggacgcttcggaggcagcgcggagctggggtcggcgcggggccgaggcaggagagcgagaggggcccctgctcgggagtcgggggtgggagccccgagggggggccctggcctggggctgagcctggcgcgaacccgaccgggaaggccctgggagcccgggggagggagacggactgatcccgaaggggcgcagcgtctcttgcgggtcgcggttggcctttgaaccctggggggactcagtcctggttttccgagccgcagtgcggaccacagccccatagtgtgagccccaggagggcccccggtcccatctgccccagccctcggggaggccccgtagcctcccgcctctggactccactctgtcttccggccaccggccccttttccaggctcagtagagacctcggatcttttctgaatggcaggggagacccctatccccttttcctgaattccagcgaggcccagtcctcttctgagccccagccagggctctgttcttctccttctgtggatgccggggtcctactgcctctcttgagacccggattgaattccgacctccccttgggagcttcccgggaccccaggtcttccttttccgaatcccagagggtccccaagtcctctgttctcaaactctgagcccaagggaaccccggccacatctcctccaaacacacacaggacctcaggtcccttcctgggtaccccaaactcttagccctagtggggtgctcagatctctcaggaaaaccagtttcccttttgttaaccccccagcggggaccccaaagcagccccttggagctgcagggagcttcagcgggcaccagttctcattcctctggagctcttggggggactccctcctgggaagccgaattctatctctaaacctcagggtgggggccttgtttttcctctgggccccgtcttctttgccaagttcttgagggcaacctagaccctcctctgaaccccagaggcttccccagccctggggatcatttttctcttctgaaccccagaagcaatctcgactttcgcatttgagattccagacaggactcggctctccctctttcatacccaggggaaactgagtccctcacccccttcaagaccccaggccgctcctcgctcccgcccctcgaggcccttcgccggctctgcctcctcccccttcccgaccccaccggccataagatgatgtggtccaacttcttcctgcaagaggagaaccggcggcggggggccgcgggccggcggcgggcgcacgggcagggcaggtcggggctgacgcccgagcgcgaggggaaggtgaagctggcgctgctgctggccgccgtgggcgccacgctggcggtgctgtccgtgggcaccgagttctgggtggagctcaacacctacaaggccaacggcagcgccgtgtgcgaagcggcccacctggggctgtggaaggcgtgcaccaagcggctgtggcaggcggacgtgcccgtggacagggacacctgcggccccgcggagctgcccggaggtgagcagccgccgccccgagcgcagggcttgcgtcccacggacagggagggagaggggcccgtgtccgaggagaaaacccgccccagggacaaaagcctgagcccggaggagacagcttgcctcgcagtaagcgccagtgcccacttcgtcctctgctctcagaaactgctgagagatagagggatcccccagatatggcccaggtccctcacgggcctaccgccagagaacctgtgccttagagcttgctttcctgctacagactgtaccccaagaccagaatgtgcctacagggagtctgtgcccccaggccatcctgtacccccagaccaggctgtgacctgagaccccctcagacgagtctgtacccctattctgcacctctaaagagagcttgtgcccccgcctacagcctgtgccccaagaccatcctgtaccccgactatcctgtacccccagatgagcctgtgtccccagctacagtttccacccccagactaacatgcacccctagaccagtctatacccccagaccagcctgcatccttacaccagcctgtgccctcagatcagcctgcacctccacaccaggctatggtcccagatgattctatgacccccaaagtccctgcccccacacagccaatgttcccaggcatcgctgtgtccccccagaccagcctacagctctagagagagcctgtgtcactagaaaaatcttgcctgtgtccccagacccagcctgtgattccagacacagctggtgtcctcagatagcctgtgcccaccccagacagcctgcaccctctggaagtgcctgtgccctggagacagcccgtgcccactctgcatgtgcccacagacagcctgtgcccatggagagacagcctgggttcctggtgtcagcttcctcttcccagcctggagacagcttgcgctcccatcctgtgagccctggggagacagacgcccaccccaaagcaggatctatgcctgttccccacctactgcttccaccaaaccaagctctcaccagacgcctcccaacacccgagggcagaccttgttccttccctgcaatgttcttcacttcctgtcctctcgcctccaaatgcccagactggacatttcagcgtttctcattttctccgagagacattcccatactccctcctttcccaaatcatggctgttttatccctgggcatggcagagagctgttccatacctccctgacacgccacgccacggcttgtgcttataccagggggacattctataccccttgggaactggatgaaatctccttctacctccactgacccatggaaaatacctggcactcctcagagcccatttgggctgtcatatatttgatcacccatatgagatctccagcactcttcagtctccaaagacggtcctatcatcccagtgcccctcaaagaatatggcctatttttctgggctccgtatgagatttccctcgtccctcacttctccagatgtgatatcttatatgtgtagagtgcaaaataggatgtcccaagccctcgataggacagtgggatgccaggccccccggctgtctgagctacccacttggtgtccagatgggctacccttgatcattttatttctgcagatgggctgtctctggcccctcaggggtctcataaaggatgatctcaaacttttgcaaaatgggagtccccagtaataagaatagtagctgcttatgtaatgcctggttctcatctcagtgttttatgtacattaactcatcaagcatcatagctagcctatgagtcgttattatcactcccgttctagagaagagaaaaatgagggggcgagaaatctcggtggctcggtctatgcacccaggctagttagatggaatttgaagcttggttgcctctcttctcaacaactgcattatatcacatctcactggtccatcaagagatcccaaaggtcaaaggtcctgggacaatggaggggtggcccatcccatctcaccgcattgtatggggttccttgcatcccttgctgtcccctccattgatcagaaaggacttcagtcttccagcagggccattaacgttatcttacaaacccaacccctcagaggacatctctcaatcttcattatctcagagaaatatctcacactcaccactgcccatcaaaaggcatccctggctcccttggctataagtatggaatgtgggggtgacccttaccctgcacttttccagatgggatgtgtcatgtttgggggtggtcgaattgggatgtgctaaactattagtagccaaaagaggatgccaggcaacctacattgtcccagaagggccgtcacacttcccttgtggatgtagaccgtgtttcccgcaatgactgcttcaaagagcacctgcacccttcgctcagtgacgtgaagcaccctttacctctttttctttgaaatggagttttgctcttgttgccccggctggagtgcaatggcacgatctcggcccactgcaacctctgcctccaaggttcaagcaattctcctgcctctgtctcccaagtagctgggattacaggcatgcaccacaacatccggctaatttttgtatttttagtagagacggggtttcaccatgttgacgaggctggtctcaaactcctgacctcaggtgatctgcccgcctcggcctcccaaagtgctgggatgacaggcatgagccaccacgcgcagcccagcatcctctacctcttgctgctgcataagaactcacatatcccactcctcctggccggacatctcaccccttcacctcccctcggggtacttggggagcgcccgcccacaccacctcacctgactcagggattgatttcttgtcccttcatatccttgttcaaattgaaaagttcaatttttcacattcatggactgcctggtccctcttctatggcctttactcctgttattctcgacctctcttctctctttctgtgcctcagtttccccatctgtagaataagagagtaggtcaggctaggtgaattctgagggaatttctgggtctaaaatgcacttcagaaagtgctcccctcccttccttcatttctccttccttctctccctttcttcctttttctgtctttcttaactttaaaatttctctctctctctttttttttttgagatgtagtcttgctctgtcacccatgctggattgcagtggtgccatctcagctcactgcaacctctgcttcccgggttcaagcgactctcctgcctcagcctcctgagtagctgggattacaggcatgtgccaccactcccggctaatttttgtacttttagtagagatggggtttcaccatattgacaaggctggtctcgaactcctgaccccaagtgatctgcctgccttggcctcccaatgtgttgggattacaggcatgagccagcacacccggccctgtgctttgttttatattattttttcctcgttcttttccagctcatctctttaatgtgtttgatatacactcacagatatgtattttgacttggaaaatatatagtgttagtttatatgtgtgttttacataaatgagatcatgctattgattttgtctgatctttgggatttttttttttttttttttttttgagatgggatctcactctatcacccaggctggagtgcagtagtacaatcttggctcactgcaacctctgcctcccaggctgaagggatcctcttgcctcagcctcccgagtagctgggattacaggtgtgtgctgccacacccagctgattttttgtatttttggtacagacggggtttcaccacgttggccaggctggtctcaaactcctgagctcaagtgattctcctgcctcggcctcccaaagtgcagggattacaggtgtgagccacctttcctggcctcaatttttggatttttaaattaaattattaatattaattatcattattgttttgatcaacactgtgtttctcaaatctctccatcttgctttaggttattctaattcatggctatatgtactggagagattttcacaaggactgtctgtgtcatttacttgtctgttccccattagatggacacctgacttgattctgactccatgttacttataaacagtgctgctgtaaacatctgcatatatattcctgttttgttttttttttctggagttataccctgcaatgaaattgttgagccacaggctatgaacattcttcatttcataaagtacctcagagtgccttcccaaaagactaggagtacccgttcatacacggtgtttcctcttatcttttcaaacgcttgatatgacccttttaatgttggccaatctaattgatgggaagtggtggctccctgctgattccggctgcctctctctgatccctggtgaagtggggcatctctccatggacttatgagttacccaggcttcctcttttgtgaattactattcataccctttgcccatttgtcaactgggttctctctctcttcttgctaatccgcaggagctctttgtgtgttctaggtaggaatccttcctgagacaggattcctttctgagtctgttagtcttctgctacttgtatcttggtatcctttgttgaatcaagtgattatccatatgtaatcccacttgaccctcaacaaacccatacgaaggggccaggaaagagattattatctcgttttaaagaggaggaactagagacccagagaggctaatggcgcacttggggccacaggtctggggctcagagccccgggtaggagtcccagctcctagatggcagtgtggtcgcaggtggctttcacacctctgggcatcatttttctcctctgtgtatcagggatgctgatgtccaagttttaggctcccgtgggctgttaactgtccagccctgagcttacgcaagggacctcacatcctcatgtctgttttctctctcctgctcccacagaagcaaactgcacctattttaaattcttcaccacgggggagaatgcacgcatctttcagagaaccacaaagaaaggtgagaacttttcaccccctgctgggtgacaggtgggggaaatgctgagcgtgctggaggagttctagagagagttatcccctcctctgctttaccccagggcaggtctcgtgtctataatctgtggctgtcccctggggagtgctggcgggagagttaatgatggggacatggtgctctagagaatctagagaactcttttttttttttttttttgagatgatgtcttgctctgtcacccaggctggagtgcagtggcacaatctcggctcactgcaacctccgcctcccaggttcaagcaattcacctacctcagcctcctgagtagctgagactataggcgcccaccatcatgcccagctaatttttatatttttagtagagatggggtttcaccatgttgaccaggctggtcttgaactcctgacctcaggtgatccctctcctcagcctcccaaagtgctgggatgacaggcgtgagccactgcacctagctgtgcctagagctcttaccccatctctgcctatgccacgttctgtgtcaccccgggcaagtcgcagcccctctctgtgggtagcacttggacatctcacaaacctgcaggcatcaagtactgaccacagtgctgggcactccatctgtaagatctccagtcctcgcagtagccctgcagggtgggggctttatcttccatcttccagaagtccaggaatggttacaattattcttcccaggaaaatttttcaccatgttggccagcctggtcttgaactctcctgatctcaagtgatccacccaccttggcctcccaaagtgctgggattataggtgtgagccaccgcacctggtccacaggaggaaatttaggctgagaagggttcagcctaaattcctactggaatctggaaaatcctactagaatcttccatgtaggaagtagttggtgagatttccaacctggatcattccactgtagcacactgcctttgccatcgtctcccacacaccccactgcctcagcttcctcaactgtaaaccagtggtaaccagatcctaagtaatagttggtaattctcaactctttctaatcctggccctctcctccctttgctcagtgactttagagaaataactgaccctttctgagtcttaattccttcaacagtgtaagtaaaatgttgggctggatgatactctacttgaaaattcttctctcgtcccgaatcttacatcttcctggttctgggttcctatgggtgaatcctcctcattccctacatcccatgttctctgcttctttcctctctcctgctggcagaggtgaatctggcagctgcggtgatagcagtgctgggcctggcagtcatggccttggggtgcctctgtatcatcatggtgctcagtaaaggtgcagagttcctgctccgagttggagccgtctgctttggcctctcaggtgagggttcagagcctggaggctgaggacattgcatgctgggaggatctccaggcactgttgcatgctgggagatggggtctctatgcactgttgcacgctcagagatggaatctctatgcactgttgcatgctgggagtagggtctccacacactgttgcatgctgggagtaggatctccacacactgttgcacgctgggaggtgggatctccaagccctgttgcatgcttggagttgaggggaagcccaagggctatagtaggttcaaagatgggagaaccccaacaaccgggctaaggattggagggtgtccaaacattgttttagatttggacctgggatttccaatcactgttgcatgctaggcattagagaaagcgcaaggactatagaggtctcaaaaattggagagttctaagccctgttgttggctgggaattggaagctgtccaaacgcttttcaaggtttgaacatggagtccccaaacactgtttcatgctgagatgttttaagcactatagcgtgttgagaggtcagggaagcccaggggctatagcaggctcaaaggtggaagagttccaagccctattgttggctcagaatttgatggtctctaaatgctcttttagatttgagacttgaggtctgcaaggactgttgcattcttggagctgaaggtctaaataaaatgctgcatcttgtgaaatgtagccctcagtaataaacaacacttcagtttattgtacttccagttcaaatccttacaacagcactattaggcagggcttactatcccccattttatttacttatttatttttgagacagagtctccctttgtctcccaggctggagtgtaatggcatgatctcggctcactgcaacctccgcctgctgggttcaagtgattcttctgcctcagtttcccaagtagctgggattacaagcaggcaccaccacgcctggctaatttttgtatttttcggtagagacagggtttcaccacataagccaggctggtctcgaactcctgacgtcaagtgatctgcctgtcttggcctcccaaagtgctgggattataggcatgagccaccacacacagcttcccccattttataaatgaggaaattgaggctcagagaagtcagatgaattactcatgggcacacaatcaatgatggcatgatggcagaggtgggattttaaactcggttttctttctttcttttttgagatggagtctcactctgtcgcccaggctggagtgcagtggcacgatttcagctcactacaacctctgcctctaggttccagcccaagctgtgccctgaatcactgtgtggccttgggaaggttccttttattttctgggccttggttttcttcttggatcaaatgttttcttttcttttctttctttttttttttttgagacagagtttcgctcttgttgcccacgctggagtgcagtggcacaatctcagctcactgcaacctccgcctctcaggttcaagcaattctcctgactcagcctcccaagtagctaggattacaggtgtgtgccaccacgcctggctaatttttgtatttttagtagagacagggtttcatcatgttgaccaggctggtctccaactcctgacctcaagtgatccacccaccttggcctcccaaagtgctgggattacaggcgtgagccaccgcgcccggccaagactttcataaaacacttttatatcaacaccttcctgtgcacccccaggggtaatgcaggtgtgagtttaataataacgccagcaccaaattcctaccaagctacaaattccatgaaaacagacatcatctttatctttttcatcgttctgtcctcagggatttagagagggcctctctggggaggtgacattgaagatgtcaaagtatggatagacaagctgggagagtttgctgcattgcagatcttgaaagaaagccagtgtgacaggagtgtggagagagacagggagactggtgtaaaagatgtcactgcattaatgtgacattaatgtcactggtcctgtgacattaacagggaatcaaaaagatctgggttggagtcccaacttcttaacagccatgtaattggggcaaacctttttctatctctgagcttaaatctccttatagccatgaactcactcatccatgtatctgttagtattgtgtccatcctatccatccatccatttatccttccgttgattgatcagtttcctccttctctccccttccttcccctctctctctttccctatgtctctttctatctctctcttttttttttgtttttgagacagggtctcgctctctcatccaggctggagtacagtggtgcaatctcatctcactgcaacttcgacttccaaggctcaagtgattgtcctccctacctttcagcctcctgagtagctgggaatacaggtgcatgccgccaagcccggctaattttcggtttttttgttttttttgttttttttttttttgtagagatagggtttcgctgtgttgcccaggctggtctccaactcctgagctcaagtgatccgcccacctcggcctcccaaaagtgctgggattataggtatgagccaccaagcccggcccctctctcttttctttcttttccaccctctttcccttcctctctccctccaatcatctatttctccttttttttttttttacttgtccattcatttaacaagtatttctttaatatccagtgagtcccagatgctgtgctaggagccgctgaggacgcaacgatgaataaaataaagatgatgtttgttctcatggaatttgtagcttgctaggaatttagtgctggtgttattattgaactcacacctgcattactcctgggggtgcacaggaaactgttgatataaaagtgttttatgaaagtcttgagcacaaaaatgttccacagattgtacaaccaattgagagtgaagaaggatttgatgttgtaattactgtggttagattgcgtgtcagggactggggcaggttgggattttgaggtctccctaaataaagggtcgtgttcaggttgtcttgtttctctccttataatacatatatcagctgttgttctagttttagaggtatgagacagagaagtctgctgccctcgtggatttatagtgcagtgggagagacagaaatgagataaagagacattagtcatacaaatcaatatacattcataactaccaactgtgatgaatgctatagataaaaagtacagagtatgagaaaaatgtatgacaggagacccactgtagatttaggtggcagtggttagtgaaggcgtccctttgaaacatgtacttcatacagagatgtgaagaataaggacatctaagacaggctcagggagggggaggcggaaaattattccaagcagcataaaggtcttcaagcctgaacaaatctggtgcattgaaagtcctgctccacgctgcgagagtgtgggaggagcagcttgagaggaggctggagaagccgcaggagccagacccgcatgcctttttatttattttatttattttttatttttgagacagttttgctctgtcacccaggctggagtgcagcggtgcgatctcggctcactgcaacctctgcctcccgggttccagcgattctcctgccacagcctcggaagtagctgggattacaggtgcctgccaccacacctggctaagttttgtatttttaatagagactgggtttctccatgttggccaggctggtctcgaactcctgacctcaggtgatccacctgccttggcctccgaaagtgctgggattacaggcatgagccaccctgcctagccatccaccagcaaattctattggcactgcttccaaaatgtgttttgaatgcaaacacttccctcggtttcactaatccaagccacggctatatttccccgaggtaatttctatggcctcctaactcttctctatgcttctccttttaacctcctcaagtccattctccacagagcagctagagtgatacttctatttttttaattttaaattttttaagacagggtctggctctgtcgcccaggctgatgtacagtggcacaatcacagctcactgcagcctcaacctcctgggctcaagcaatcctcccacctcatcctcgagtagctgggaccacaggcacacgtcaccactctgggctaatttttaaaattatttgcagagatgaggtctcactatgttgcccaggctaatcttgaattcctggactcaagcagtcctctcgcttcagcctcccaaactattgggatgacaggcatgagccaccgcacccggccaagtgatacttttttttttttgagacggagtttcgctcttgttgcccaggctggagtgcaatggcacgatctcgactcactgaaacgtctgactcctggattcaagcgagtctcctgcctcagcctcccgagctgggattacaggcatgcgccaccacgcctggttaattttgtatttttgtgtgtgtgtgtgtgtgtgtgtgtgtgtgtgtgtgtgtgtgtgtgtgtgtgtgtgtttagtagagatgggctttctccatgttggccaggctggcctcgaactcctgatgacctcaggtgatctgcccgcctcagcctcccaaagtgttgggattacaggtgtgagccaccacgcctggcccctaagtgatacttttatatcataagtcggatcacggattctccccagaataaaagccacttaaattcctactgctagaataacatggtggcaaggcctcgcgcgggctgactcccggcgccctgcgactccctctcctgccacctgctctccctgctccggccacgccagcctctgctgttccccagacgctctaagctcattcctcccgcagcgtgttttcccgggctgcctcctcggcctggagcgttcttccgccggcgcttcacgtgtctcgtttcctcgcattgtttaagtctctggtcaaatgtcaccacctcagagagaccagcactgaccatcgtgtctaaaggggactcatttggtatccaagaaaatgttaaaaataaataaataaataaataaataaaagaggggggcgcggtggctcacgcctgtaatcccaacactttgggaggccgaggcaggtggctcacaagatcaggagttggagaccagcctgactaccatggtgaaaccctgactctactaaaatacaaaaatcagccgggcgtggtggcgggcgcctgtaatcccagctaagcaggaggctgaggcgggagaatcgcttgaacccgggaggtggaggttgcagtgagctgggatcgcgccactgcactccagcctgggcgacagagcgagactccatctcaaaaataaataaataaataaataaataaataaataaataaataataataaaagaaagagcacgtgagagaaactgggcgcggtggctcacgcctgcaatcccagcactttgggagggcgaggtacgtgatcccttgagcccaggagttcgagaccagcctgggcaacatagtgaaaccccatctctaccaaaaatacaaaaactagctagtctcataacctgatctcaaaaaaaaatagataaaaatttaaaaataaaataaactggccgggcatggtggttcatgcctgtaatcccagcactttgggaggctgaggcgggcagatctcaggattaggagttcgagaccagcctggccaacgtggtgaaaccccgtttttactaagatataaaaaattaggcgggcatggtggtgatgcctgtagtcccagctactaaggaggctgaggcaggggaatcacttgaattcaagaggtggagattgcagtgagccaagatcgcgccactgcactccagcctgggcaacagagtgagactccctcttaaaataaaataaaataaaataaaataaaataaaataaaataaaataaaataaaataaaccaggcgcggtggctcactcctgttatcccataactttgggagccgaggctggcagatcacttaaggccaggagtttgagaccaacctgaccaacatggtgaaaccctgtctctactaaaaatacaaaaattagctgggcgtggcggcgggtgcctgtaatcccagcaactcgggaggctgaggtgggaggatcatttgaacctgggaggtggaggtagaagtgagctgagatcgcaccactgcactccatcctgggtgacagagcaagactctgtttcaaaaataaataaataaataaataaataaataaaataagaaagaaagaagactcatttctagctgggactttacctgctttatttttcttcacagaatttatcactacctgaaattctctgcttatttatgcccgtattcatttgccagggccactataagaaagtaccacagcctgggtggctctctatttatttatgcccgtattcatttgccagggccaccataagaaagtaccacagcctgggtggctgtggtacaacagagattgatttcctcaccgttctggaggctggaggtctaagaccaacgcgtccacagggaagttttctccaaggcttctcttcttgtcttgtaaatggccaacttatccctgtatcttcacatggtcttccctctgtactggtctgtgtccccagttccttctttcttttcttttttttttttttttttttttgttgagtcagagtctggctctgtcacccagattggagtgcagtggtgtgatctctctctgctcactgcaacctccccctcccgggttcaagtgattctcctgcctcagcctcccgagtagctgggattacaggcacccgccatgacacccagctaatttttgtattttttagtagagagggggtttctctatgttggccaggctggtctcgaactcctggcctcaggtgatctgcccacctctgcctcccagagtattgggactacagccgtgagccactgtgcccggccttcttttttttattttgttattttattttattttattttattttgtagagacagggtctcactctgttgcccaggctgatcttgaattcctggcctcaagagatcctcctgcctgaaattttttttatctcataaggacaccagtcacattggattagggttccttctgatgacttcgctttaacttaattatctgtttgtgtgtgtgtgtgtttgttttgttttgttttttgagacagggtctcactctgttgcccaggctgaagtgcagtggttcgatctcagctcactgcagcctctgcctgcaggattcaagcgattctcatgcctcagcctcccgagtagctgggattacacgcatgcaccaccacgcctggctaacttttgtatttttagtagggatggggtttcaccgtgttggtcaggctggtctcaaactcctgcgatccgctcgccttggcctcccaaagtgctggaatgacaggcgtgagccactgcacccagccttaacttaattctgtctttaagaactctatatccaaatacagtcatgttctgaggtacttggggtcaggaccccaaaacatcaacttttttgtggaggacacaactcagccctcaacagtgcatttaactgataattgtccatctctccttcttggatgaaactccagaaggacagggatttagttgtagtatcatttatgtatcatattatatgtattttgtaataagagctcaatgaacatctgttgaatgaatcaaagaatgcatgaatcaggtctgctgtggtggctcacacctggaatcccaacattttgggaggctgaggcaggaggattgtttgaggccaggagtttgagaccagcccggggcaatgtagaaagatcccgtctctacaaaataaaatgaaataattagccatggcagcttgcgatgtagtcccagctactcaggaggctgaggcaggaggagggcttgagcctgggaggtcaaggttgcatgcagtgagctatgatcgcgccactgcactccagcctgggtggctgagaccttgtcactaaaaaagagaaaagaaaaaaaaaaaagattgaattaggaaaggaatgaaggggagtccttgtctaaatgcttttccacctcccgttctgtaatgttgggctgcatggagcaaagaaggggcttttaaatcacagcatcctggctgcattctccaggccctgaatcaaaaccacagtgaatggctgggcacggtggctcaggcctgtaatcccagcactttgggaagtggatagatcacctgaggtcaggagtttgagaccagcctggccaacacggtgaaaccccatctctactaaaaatacaaaaatgagccaggcgtggtggcaagagcctgtagtcccagctactcaagaggctgaggcaggagagtctcttgaacccgagaggcagaggctgcagtgagctgagattgcaccattgcactccagcctggatgacagagtgagattccgactcaaaacaaaaccaaaaccggtaaacaaacaaacagaaaaaaacaccacagtggggctggggcgcagggaggaagcagggtcaggaactggggttggggcaggactccagggtctggagagaaggcggctgggatccatgactcatgcgtgactctcagacggtcctgcatgacctggcccctgcccgcccctgcagttccattaccgcctctctccccaaccccaactctccttgctcccaccacactcagcttttctcttttctccaaacactctgtgctgcgtcctacacaggaccctcgcgtcagcacctccttctgctcggaacagccgttgcttcgttttgagcatgactgacttcttttcatccttcaggtcccagctcaaatggcttttctcgacaccatccaaagtccctgctccacccctgggtgccactctctctgtttctatttccttcctttcatgcatcaccctctgagattatcttgtctcctcatttgtttattttggacattgcaacctggcagcctgcaggccctcgatggccaggagatgtgctttgtttgccaggcagtgtgtaaagatttcttcgagttgacgtttaaaggttgggagaattcccataaaaataataatcatttaagcaattataggccgggtgcggcagttcacccctgtaatcccagcactatgggaggccaaggtgagtggatcgcttgaggtcaggagttctagaccagcctggccaacatggtgaaaccatgactctactaaaaatacaaaaattgccgggcgcggtggctcacgtctgtaatcccagcactttgggaggccgaggcaggtggatcacaaggtcagaagttcgagaccagcctggccaacgtggtgaaaccccgtctctactaaaaacacaaaaattagccaggcgtggtggcgtgtgtctgtaatcccagctactcaggaggctgaggcaggagaatcacttgaactggggaggtggaggttgcagtgagctgagatcatgtcactgcgttgcagtgagctgagatcatgtcactgcactctagcctgggcaacagagtgagactccatctaaaaaaaaaaaaaaaaaaattagccaggcgtggtggagcacacctgtagtcgcaggtactcaggaggctgagcatgagaatcgcttgaacctgggaggcggaagctgcaatgagctgagatcatgctgttgagcagctgcagctggcttctgccatcatttctaccttacttgccgccctgtgtgtttacactttctcatgccccctgcaggcatttgagttttgcaaattttggtttatttgtttactgtctatctccaagtaatatataagctccacgagggtagggtctttctctatcatgttctttctttttcttcttttttgctttttttaaaaaaaaaaaatcagcctgtaatcccagctactcgggaggctgaggcgggagaatcacttgaaaccagaaggcagaggttgcagtgagccgagattgccactgcactccagcctgggtgtaagagcgaaactccgtctcaaaaaaaaaataaaaaataaaaaattgcattgcaatatgactttatctttattttgtgacccctccccctctatcactcttttaaaaaacttgcatggagactatttcttttctttcttttttttttttttttgttgcccaggctggagtgcaatggcgtgatcttggctcaccacaacctccgcctcccaggttcaagcaattctcctgcctcagcctcccgagtagctgggattacaggtgcacaccaccacgcccagctaattttgtagtagagatagggtttcttcatgttggtcaggctggtcttgaactcctgacctcaggtgatccacccgcctcggcctcccaaagtgctgggattacaggcgtgagtcactgtgcccggcccaatttttgtatttttagtagagatgggatttcaccttgttggccaggccagtctcaaactcctggcctctagtgatccaatcgcttcagtctcccaaagtgctgggattgtaggtgtgcctggccgctaatggagtcttaatttgaattttgtgttttctgattcctgtgtttgctttaagaaaaaaaagttgtgggaaaatgtgctaaacataaaatgtgtaattttaaccatttcccctttttattttcaatttttatttatttatatatttttaagaattgggatcttgctgtgttgtccaggctggagtgtactggtgtgatcacggttcactgctgcctcatccttctgggctcaaatgatcctcccacctcagcctcctgagtagctgggactacaagcgtgcaccaccacacctggctaattttttaaaattttttttttgtagagatggagtcttgctatgttgcccaggctggtctcaaaatcctggcctcaggcaatccttcgtcctcggcgtcccaaagcgcttggattacaggtgtgagccacagcacccagcctcctcttttatttttagttgacatgtagtacttgtacatatctgtgggaaacagaaggatggtttgatgcatgtaaacaatgcataatgatcagatcagggcaattagcctatccacctcttcaaacttgatcatttcttcatgttgtgaccatttcaaaatcctctcctctagctctttgaaaatacacagccaggcacggtggctctcacctgtcatctcagcactttgggaggccgaggtgggtggaccacttgaggtcaggagttccagactagtctggccaacatggtgaaaccccgtctctactaaaaaaaaaaaaaaaatatatatatatatatatatatacacacacacacacacacaaaaattagccaggcgtggtagcgcacgtgtgtaatcccagccactcaggaggctgaggcaggagagtcgcttgaaccccagctactcgggagactgaggcagaagaatcaggaggcggagtttgcaataagctgagatcgcaccactgcactccagcctgggtgacagagcaagactccgtctcaaaaaaaaaaaaaaaaaaaaaaacaaaacaaaacaaaaacaaaaaactaaggaaccatattcaccctacagtgctgcgaacaccagaacgcgtttctcccgtctagctgtgattctatatccgccttttaatcattttccagcgtacggttctgtggcatcaattccgttcacattgttatgcaactatcacccccatccaccttcagaacgatttgcgtcttccccagctgaaattctatacctgttaaacaccaactcccctttttcctcttccctccggccctcggcaaccatccttctactttctgtctctatgactttgtgtcttgtttttttttttctttatctccagcttcccaaatgctgcctgctatatagtaggtgtttagtaagtatttgttgagtgcacgcgtgggaaggtgccagggtgggcgggagggctgggagcggatggcggagatgttcagacacagctggggtcgcgggcgtctgactgcgagctgtcctctctcccgcaggcctgctgctcttggtgagcctggaggtgttccggcattccgtgagggccctgctgcagagagtcagcccggagcctcccccggccccacgcctcacctacgagtactcctggtccctgggctgcggcgtgggggccggcctgatcctgctgttgggggccggctgctttctgctgctcacactgccttcctggccctgggggtccctctgtcccaagcgggggcaccgggccacctagagccacgcgtgagacttctctaagcaaccaccgagccctttgaccttctccattgtacccccaagatctttttgccccatctcctagagaaactgtgttctccctgctcgggggcccatgtttttttacacgcctgcctcctgtccccttatcctttctccctctgtaaatacgtttttctctgtggctgtatgtgggttgcttgggggtgggatgggaagaggctctttgcaaacgagggtccccagagaagactggcggggacctgatggggtagctggggtgtggggttgggggatgaggtcagggggtcttgggtgggagttgggggccccttcatttcccaggtctggatcgattcacttgccgggagagactttttacaactcatctgcagctccgggtgcggttgggggagatagcgaagggtctggcctcgctgtgatctgatttgggattaaaggtttggaaatttaacaactttgctttggagtctatttgtgatgtgatcgtgcattctggggtaaagaaaagtgaccccatattccctccagaaacataccctccagaaacacttttaagcccagaagtcacatgaaaacgaacccatacacaatggttgagagtgtggaaaacacaatatattttttatttttatttttattttgagacggagtcttgctctgtctcccaggctggagtgtagtgctgcaatcttggctcaccgcaacctccgcctcctgggctcaagtgattctcctgcctcagcctcgcaagtagctgcgtttacaggcacgagccaccatgcccagctaatttttgtattttttttttttttttagaagagacggggttttaccatgttaaccaggctggtctcgaactcctgatctcaagtgatccacctgtctcagcctcccaaagtgctgggattacaggcgtgagccaccgtaccccacccagatttcccctttacacatgactcctgtcatacgtgattaggatttacccccaatgaccttattttaacttgattatctctgtaaagaccgtatctccaaatgaggtcacattcttaggtactgggggttagggtccaacatatatatatatatatacattttgtaggggagaacattcaaccattaacagtgtatatattctaaattgtgttttctggtcgggtgtggcggctcacgcctgtaatcccagcactttgggatgccaaggcgggtggatcacctgaggtcaggagttcaagaccagcctggccaacacggtgaacccccgtctctactaaaaatacaaaaattagctgggtgtggtggcaggcacctgtaatcccagctactcgggaggctgagtcaggagaattgcttgaacctgggagttggaggttgcagtgagccgggatctcgccactgcactccagcctgggtgacagagcaagactccgtctcaaaaaaaaaaaaaaaaaaaaaaaaaatcaaaaaggtggggggaagggggattggttcaggaaagccttccgaagaagatgacgaacttgagtcttcaaggtgagtaagaatcagagaaagtggagaacgtcacgggcgttccagctgggtgggagagcctggacagaaacaagaggaaaaacatgatgaacctgtgagtgaggaaatgtgaacgctggtgttcagagtgagacacaggaaacgtgagagggttggggtgggctgtcttatgaacaaggtggagagactcagatgctcaacagaacagcttggcctttaccctgagggtactgaggagccatgggagcttgctgagcagagacacactggcatcaggtcaaggggttgaaacaaggtttcttattcttgaagtcactaaattgcagacccggaagacagactagtggttgccaggtgttaagaaaagggtgagtcttggccccacgcgacggctcatgcctgtaactccagcaccttgggaggtcgaggcgggtggatcacctgaggtcaggagttcgagatctgcctggccaacatggtgaaaccctgtctctactaaaaacaaacaaacaaacaaaacaaatcaacaacaacaaaacatacaaaaattagctgggtgtggtggctcacatctgtaatcccagcaccttcggaaatgcctgttctaatttaggtccatgggcacaggccctagggtagagcccttgccagagaccctgcccttctctacccagcagttctctgcccccctcccatatcaaaatgctttttctgcatctattgagatgatcatgtgattttatttttatttttattttgcagtctcactctgtcgcccaggctggagggcagtggtgcgatctcggctcacggcaacctccgcctcccgggttcaagcaattcttgtgcctcagccaccccagtacctgggattacaggtgtgcgccaccagacccagctaatttttgtatttttagcacagatggggtgtcaccacgttggcctggctggtcttgaacgcctgacctcaagtgatcgtcccacctccgcctcccaaagtgctggggttacaggcgtgagccaccgcgcccagctgaccatgcgatttttgtttctaattctgcattcttccattcaacaagcagaagtgccccgcagtgcctgggcacctgggagccaggctggtgtgaaagcccagctccccgacctatggctggggcaacagcttcacctctctctgtcttcgttccttcatccctaaagacggtgcgtgagctcaatcctgtacctactcccaggagtcaccgtcgggagtaaacgccatcatgagccctgcaaagctcccaggagaccgcctggcacgtggtcgcaactcgatctgcctttgctgttagtttttctcaagtggcacttacagagtaaacagggacccccgacgacgagctgacagcctgctgatggaaacagatactaatcacatcactgaagtaatgagcgtgcaattataaaccaagttaagtgctaggagacaagagagtccacaattttttttttgttgtttgactttgtgcccagccaggtcagggaagcctcaagagacatctgccatgggggtggcggagatagttggtcttgggggaatggcccttccttccttccttccttccttccttccttccttccttccttccttccttccttccttccttcttttctttcttcctctttctttctttcttctctctctctctctctttctttctttccttctttctttttctttttttttttttgagccgaagtctcgctctgtcacccaggctggagctcggtggtgcaatctcggctcactgcaagctccacctcccaggttcacgccattctcctgcctcagcctcccgagtagctgggactacaggcgcccgccaccaagcctggctaatttttttgtatttttttttagtacagacggggtttcaccttgttagccaggatggtctcgatctcctgacctcatgatccacccgcctcagtctcccaaactgctggaattacaggcgcgagccactgcgtctggcctctctctcttcctccctccctcccttcctttcttcctttttctttctttctttcttttttcttctttctttctttctttgtttctttctctttctctttctctctttctctctctctttctttctttctctctttctttctttcttttcaagatggagtctcactctgtcccccaggctggagtgcaatggcacaatcatggctcactgcagcctcgactttccaggttcaagcgattctcgtgcttcagtcccccaaatccctgggactacaggcacacacagccacagccagctaagtttttgtattttttgtagagatggggatctcccactgttgcctacattggtcttgcacttctggtctcaagtgacccactcgccctggcctcccaaaatgctgggattacaggcatgagctaccgtgcctggccactcttcattaaaaaaaagataaataaatagagatggggtctcactgtgttgcccaggctggtctcaaacaccaaggctcgtatgattctcctgcctcggcctcccaggtacatgaaccaccgcacctggtgggaatggctctttgtccagtggggtcatcattctgaaaactctttcttacccggggtcagggcagggaaggttcaaagccagagactcaagagaaaagggagatggcaattttcccccaaaccctccctgaccacactccgagtggttcccccacggccagttcaggcttcagctctgggtggggagagactggagggaggggaaggcagagatataacatagattgatcagaagtgggagaaggaattacagacctcacaaagacaaatgactggaatcacatcatcctatgaaacaatgtattgttggggctcagaaaacaatacccccgaagtaaggatgacgtttgtcaggtggagcatttgaactaaaggagattagaaggtctcagaggcggccgggccatcatctctacaaaaaatacaaaataactagctgggtatggtggtaagtgtctgtagtcccagttactgaggaggctgaggcaggagaatcacttgaacccaggagatggagtttcagtgagccgagatcatgccactgcactccagcctgggtgacagagtgagaccctgtctcaaaataaaataaaataaataaaataaaataaaataaattagctgctgctgctgctgatgcacagtgctatgtatgagtgttccaacagtagctattttaattaaattaatttttttgagacagggtctctctctttcacccaggctggagtgccgtggcgtgatcacagctcactgcagccttgacctcccaggctcaagtgatcctcccacctcagcctgctgaatagccggaactgcaggtgcatgccaccacaccaggccaatttaaattttttttttaaagagatgagatttcaccatgttgcccaagctggtcttgaactcctgagctcaagcgatctgcccacctcaacctcccgaagtgctgcaattacagacatgagccatcgcgtccagcctattttaattttataacctctcatgaaatctctccttcctcaatttctcttctgagggttctgactttagccggaattggaaagaggcccaatgcttcatgaaggatgacagctggagaagtactagaaggttgcctggcaacagtggtgttagggcagaaaggagcaagtccctgggtggtttcctagcagaaggaatgtgggcagggctgagcctaggaagcaagataggagatgacaagggtgcccagatcatcaacttctgaagaatttctcatccctgcaccccagagcctctggacacagcccatctctcatctctctctctctctctctctctgtctctctctttttctcccctcccttctcatcttttcctcgtcttttttccctttccctctcatccctccctcctcctccttttacttctttcttccttttcttcttcctcttcctccttctcctattactattactactgataataacaatagctaacatttgttaaatgcctcatctgagagattttctttcggggtgattaaaagtttctgatgctaggccaggtgctggggctcacacctttaatcccagcactttgggaggccaagttaggcagatcgcttgagctcaggagttcaagaacagcctgggcaacatggtgaaagccagttccctataaaaaaaaaatacaaaaattagccaggcatggcggtgcatgcctgcggtcccagctactcgggaggctgaggtgggaagatcacttgagcccagaaggtcaaggctgcagtgagctgtgattgcacccttgcaatccagcctggaagacagagtgagaccctgtcttgaaaaaaaagaaaaaaaaaaaaggccaggcgcggtggttcacgcctgtaatcccagcactttgggaggctgaggtgggcagatcatgaggtcaggagatcgagaccatcctggctaacatggtgaaaccccgtctctacttaaaaaaagtacaaaaaattagctgggcgtggtgatgggcacctgtagtcccagctgctcgggaggctgaggcaggagaatggcacgaacccaggaggtggaggttgcagtgagccaagatcacaccacttcactccagtctgggcaacagtgcaagactccgtctcaaaaaaaaaaaaaattttttttcctgacactagatagtggcaatgcttgcacaacattttggaggtacttatgtacttagtatcagtaagtatagtacattttttaaatagttagaatggtaaaatcttgctttaagtaacggtaagattttaccacaaaaataaagtccaggcatgggtaaagaatagtttacgaccactatgaaataaagagaagtgagcatgaggaggttctgaaatgggtatcactccctgataagaagctagaaggaggccaggcgcggtggctcacgcctgtagccccagcactttgggaggctgaggtgggcagatcacgaggtcaggagttcaagaccagcctggccaatatggtgaaaccccatctctgctaaaaatacaaaaattagctgggcatggtggtaggtgcctgtaatttcagctactcggaaggctgaggcaggagaatcgcttgaaccttggaggcggaggttgcctccaagatcacgccactgcactccagcctgggcaacagagcgagactccgtctccaaaaaaaaaaaaaaacaaggaagatagaaggggagaagggagttgttgagctgttgcctcacccttgagcatggtctggacaggacacaatgtgtggagctgccccgggtcatgggtgaccaggaggcaacaggccaaacattgaagacatgagtggtaaaacagaaagggcttggttcttagcaacatgcatgagtttttgcacaaaatcttcctgttaggcaaggtaactaaatatcttttttgtttaggtaatcagttcttcaaaactgagcccatgttgataagttactccaccaaagggtggagtacagtaaagaaatgaggcttgtggttacagatgaagcaatgtctttgagaaaagcccttctttgccacaatcactttttttttttcttttgagacagggtctctctctgtcgcccaggttggagtgcagtggcgtgatcttggctcactgcaacccctttccccctggttcaagcgattctcctgcctcagcctcctgagtagctgtgattacaggcacccaccaccacgcccagctaatttttgtatttttagtaaagacggggttttgccatgttggccaggctggtcttgaactcctgacctcaggtgacccgcccgcctcggcctcccaaagtgctggattaggcctataaaagccattttaactgcggtgagaggatatatgtgtcatgtagtttagccaggcatcgtggtgcacacctgtagtcccagctactcaggaggctgaggtggggggatgacttgagcctggaggctgcagtgagccatgatcgtgtccctgcattccagcctgggcaacagaccctgcctcaaaaaaaatacataaaataaaaattaaactgaaatagggttgccagattcaatgtaggatgcccagttgatttcaaaactcagataaacaacaaataaaatgtttaagtctaagtacagcccccaaactgcatgagatatacttacattcaaaatttttttgtttatctaaaactttaaatttaactgggcatcctgtattttaatgtcccaagtctagcaattctattttaaaagaatccctctgtctgctacgttgagagcagatggtcaaggcgggaaatgaaggtagaagcagggagatggtttaggacgctattgtgatcaggtgagaagggctgagtcagaccagagggtgccagcaaggctgaagacccaccctgttcccagccccgcccctcctgctgcccttaactgatgtgacacaatccttgtgaggtctgtggacagagcgggggaactgcacggaatctgacaatatcaacctaaaaattattcactgcctactcatttcccgtgcaaggacaaacaagagtgctgaaatgcgaggcttgcaaagccacaagatagggagggcttaatcatttgcttgcctgccttatcagtgttacgaaggcattttccaccttccacttccttttccgtttggacaaaaattcaaacttctaggccaggcgcggtggctcacccctattatcccagcactttgggaggccgaggcgggtggatcacttggggtcagcagttcgagaccagcctggccaacatggtgaaaccccgtctctattaaaaatacaaaaattagctgggcctggtggtgcatggctgtaatcacagctatctggaggctgaggctggagaatcgcttgaacccaggaggcgggggttgcagtgagctgagattatgctaccgcactctagcctgggcaatagagtgagactcagtctcaaacaaaacaaaacaaaacaaacaaaaaaaaccacacgcacacacacacactcaaacttcttttattttttgagacagattttcgctcttgttgcccagcctggaatgcaatggcacgagcttggctcactgcaccccccctctcaggttcaagcgattctgctgcctcagcctcccaagtaactgggattacaggcatgcgccaccacgcccggctaactttgtatttttagtagagatgaggtttctctatgttggtcaggctggtctcctgcctcggcctcccaaagtgctgggatgacaggcatgagccactgggcccagctacattcaaacttctttttttttttttgagacggagtctcgctctgtcgcccaagctggagtgcagtggtgcgatctcagctcactgcaagctccgcctcccgggttcacgccattctcctgcctcagcctcccaagtagctgggactacaggcgtccaccaccacacctggctaattttttgtatttttggtagagacggggtttcaccgtgttagccaggatggtcttgatttcctgacctcgtgatctgccccgccttggcctcccaaagtgctggggtaacaggcgtgagccactgcacccggccccacattcaaacttcttatcacaacttgcaaagttctgcatgatccgggcttagcacctcccttctcctgctgtgctctagccggctcactttgcctcagccacgctggcctgtgtccattcttggaactagtactggccaggcttgctcctgccccagggcctttgcctgcgctgtgccttctgcctgaagtgtcattctctttgcatttctcatggctggatacttacactgtttttaattctcagcttcaacatattttcatccaagtcttcccttacccactttgcaaaggaaagacccacctcccatacactcattgtgttatagtgcatccctcttgatttctagcatgtctcttgttacaatctacagtttgttgtttttttctttcagatggagtcttgctctgtcgcccaggctggagtgcagtggtgtgacctcaactcactgcaacctctgcctcccgggttcaagtgattctcgtgcctcagcctcccaagtagctgggactacacgcgtccaccaccacgcccagctaatttttgtatttttagtggagatggggtttcaccatgttggtcaggctggtctggaagtcctgacctcatgatccgccagcctcggtctcccaaagtgctgggattgcaggcatgagccgccgcacccagccaacagtaacagtcttttcaaaatgcctggtccatagtacgtgctcgacaaatatttgtgaaatcactggatacataagacagttccagggaaggggagtagcttgctcagaacagggaagctgcccaggagtctttcccctgattctcagaccacgatcccgtgctcagctcctcgcggattcaaggctgatgaaggcaagggccacactgtcacccactctttgaaagccccaaaccagaagtcattccggggtggctgttcaaggttcttcactgatcaggtctcttggtaacaagtgttggcctcccacaggtacatgtcagcatctccttcctttcagaggctgaatgcttgtccatttatgtagatcccacactttctttacacattcattcattgatggcacttacattgcttccatttcttggtttttgtgaataatgctgttaagaacatcaacgtataaattatctcttccggccgagcgtggtggctcacgcctgtaatcccagtacttcgggaggccaaggagggtggatcacttgggcccaggagttcaagactagcctaggcaacatggtgaaaccctgtctctacaaaagtaaaataaaataaaattaaaattaaaagtagctgggcttggtggtgcatgcctgtagtcccaactattcaggaggctgaagtgagaaggtcgctcgagcccaggaggtcgaggctgcaataagtaagccaagatcacactactgtattactcaccaggcaacagagagagagaccctgtctcaaaaataaatacacagataggctgggggcagtgactcatgcctgtaatccttggcttgggaagccgaggagggtggatcacctgaggtcaggagttcaagaccacccgggtcaacatggcaaaaccccatctctactaaaaatacaaaaattagctgggcatggtgttaggtgcctgtagtcccagctactcgggagactgaggcagcagaatcacttaaacccaggaggcagaggttgcagtgagctgagatcgcaccactgcattccagcctggctgacagagtgagactccgtctcaaaaaatacatacatacatacatacatatctcttcaagatcctgcttggaattcttttgggtatctccccagaaatggaattgctggatcccatggtaattctattttatgagttagaacttgatggcctgaatttttgtggtgtcagctgcagactcacagtgagggaagcccaggaggggatgggctttaagaggatgatgctgcaacagaggggctttagttaacacggatgtgctgtgttcttgagccttcctaagagagtagattgtaagtgttcttaccacacacacaaaaatgataaatgtgaggcaatgcacatgtaaattagctcaatttagccttttcacaacgtatactatttcagcacatcatgttgtacaccataagtacatacaatttttatttgccctaaaaaataaatcagtaatgcttaaaaaaattaaatttcatattgtagggggggaaacagtgcatgatgttgcaatgtactgcgtttcatttcctgaagcgtcagcgaaagaccagccctggggtagaagaccggagcggagggagcgtggcctccccagctccccacttccttctcaagctgcaggctgaactagggtctctggaactgggctaaggcgcccccgtgtctgcagcctctctgcggggcttcatggactccagcaaaaggcttgaggctggaaacgagggtatgagcgtgcggagaggtagggtgaggttgggtttctgcaaggaaataataatcaccgtgcttaactgatgtactaggcaccaggctgaaggccccatcagctggcgaggctgggagagaaattgacatcccctcttgctgccccgccgttggctggaaacagtcatgagccgccacctagcggcgaaaatgacagcaacaacttggacctagagctggggccacggaacgaaaggcgtcatccctttaaattaggacaattgccctctctcagggcagcttctctgttctggttacctgctgacttacacccagtcaccccaaacttcgtggcaaaaaacaactgctatttatccatccatccttccttccttccttccttccttctttccttccttccttccttccttccttccttttatgaggcagagtctcgctctgtcgtccaggctggagtgcagtggtgcgatcttggctcactgcagcctccatctcccgggttcaagcgggattcccctgcctcagcctccctgctagctgggattacaggtacgagccaccacgcccagctaatttttgtatttttagtagagacggggtttcaccacgttggccaggctggtcttgaattcctgaccttaggtgacccgcctgcctcagcctcccaaagtgctgggattacaggtgtgagccaccacgcccggctatagtttatttatactcgtagattctagcagtcaagaatttggacagagtacagcaagggtggttttatctgcagcctcagctgcaaagactggaatggagggtgccggaattatctggaagatctgggagcgtcttcactcatacgtccggtgtctgggctggatgactccacggttgtgcgcagctggaggacagctgacccgagtgcccacacgtggcctctctgtgtgacttgggcttcctcacagcatggtggtctcaggacaggcagacttcctgcatgacgtttggttcagcaaacaaggcagaaggtgaatcaccttttatgatctagactcagaagttgcctctaggctggagtgcagtggtgtaattatagctcactgcagccttgacctcctggactcaagagatcctcctgcctcagcctcccaaatagttggaactacaggcatatgccaccatgcctggataatttttagtttatttgttaaatgtagagacggtgtctattctgactctatcagccgaagcagtcagggactcaccaatatttcagagcaaggagctatagactgcacctgtagaagggagaatgtcagctgggcgcggtggctcatgcctgtaatcccagcactttgggaggccgaggcaggtggattacctgaggtcaggagtttgagaccagcctggctaacatggtgaaaccccgtttctactaaaaatacacacacacacacacacacacacacacacacacacacacacacacacaaaattagccaggcatggtggcgggtgcctgtaatcccagctactctggaggctgaggcaggagaattgcctgaacctgggaggtggaggttgcagtgagctgagatcgtgccattgcactctagcttggacaacaagagcgaaactccatctcaaaaaaaaaaaaaaaaaaagaagagagaatgtctaacaacttgcagctgtgttttaaaactggatgttctccctgaggacttgaatataaagctttgtcagttgcttggtgtggtgaagcaatgagagtgtttttttcgggggaggaggtgtcagatagatcaagaatttataattagcataagaaatgtacttcttaacaaagccagcctgggcaacatagtgagattcccatctctacaaaaaaaaaaaaaaaaaaattagcccagtgtggtggtgcacacctgtggccccagctacttgggaggctgaggcaggaggattgcttgagcctgggaggtcaaggctgcagtgagctatgattgtgccactgcactccagtctgtgtgacagtgcaagaccctgtctcaaaaaataaaaagaaaaaaaaagaaacatactaaaaaaggacacatattagcaatatgaaacaagaacaattttccataaagcaagaggcttatggaaataaaaagtataaaaatacatgatggtaaaaaatatataacattatcctctaacagaataggcagtagggtgggtgccgtggctcacgcctgtaatcccagcactttgagaggctgaggtgggatgatcacttgagaccaggagttcgagaccagtctgggcaacatggtgagaccgtgtctctttaaaaaaaaaaaaaaaaaaggcagaattgatacagctgaagaaaaatgaacaagtaagaaaatgtggtggaggaacttctccaggaagctgatataattatattaagatcagaaaaaataagagaaaagtcatcgtacgatataagggacaggtgtttctcaaaatccaaaatcttctctgctaagagaatcctgattttgtttttgtttttgtttcttgagatgcagtcttgctctgtcgcccaggctagagtgcagtggtgcaatctcagctcactgcaaactccacctcccagattcaagtgattctcctgcctcagcctccccagtagctggattacaggtgctcgccaccacacccagctaatttttgaatttttagtagagacggggtttcaccatgttggtcaggctggtctcaaactcctgacctcgtgattcgcccacctcagcctcccaaagtgctgggattacaggcctgagccaccgcacccagccgagaaccctgattttgttcaggtgtcagttggccacccttgttccttggagacttggcccttttctagtttcaggcatgaatcttgattagtctaaggcttagtgacgtgctggttgtgaaagtgtggtccctgaaccagcagcgtcagcatcacctgggagctcgtcagaaaggcaaattcttgagccccaccccagacctactgaatcagtcagaaactctgaaggtgagcttttcctttctcctcctctccaacctatggtttgacaagtcctccaggtgattctgatgcacactgaagtttaaacacctttagcccagttaggtaaactcacgcccactgctagtggttatttaaggaaggggctggatgcaattgtgtttcttgagatgtgagtggaaatctcgtgggaggcttcctcatgttggagagggccgcgttggaagggcctttctatgcccttcgtctgctttttatctcatcctttccaaaaaattaactttttatttatttatttgagacagagtcttgctcttgtcgcccaggctggagtgcagtggcgcgatctcggctcactgcaacctccacctcctgggttcaagcaattctcctgcctcagcctcccgagtagctggggctacaggcacctgctactatgcccagctaatttttgtattttccgtagagacagggcttcaccatgttggccaggctggtctcaaactcctgacctcaagtgatctgcccacctcagcctcccaaagtgctggcattacaggagcgagccacctcacctggcttaactttttattttaaaatagttctggaggccaggtgtggcagctcacgcctataatcccagcactttgggagtctgaggcagaaggatctcttgagcccaggtgttcaagaccagcctgggcaacatggcaaaatcccatctctacaaaaaagtttttaaaaattagcatttgcctgtgcgtccagcttctcaggaagctgaggcgggaggatcacttgagcttaggaggtcaaggctgcagtgagacaccatactgggattacaggcgtgagacaccactccaggtctgggttctctttttttttttttttttttttgagacagagtctcactctttcgcccaggctgcaatgaagtggcaccatcttggctcacagcaacctccaccccgcagattcaagcgattctcctgcctcagcctcctgagcagctgggattacaggcgcccgccaccaagcctggctaatttttatattttagagatgcccaggctggagtacagtggtgcgatctcagctcaacacaacctccacctcccggattcaagtgattctcctgcctcagcctccccattagctgagattacaggcatgcaccaccacgcccggctaattttgtatttttagtagagacagggtttctctgtgttggtcaggttggtctccaattcctgacctccggtgatctgcctgcctcggcctcccaaagtgctgggattacgggtgtgagccactgtgcccggctgatcttacattttcttgtgcacttattcatgagctttttttttttttatgaaaatgaattcctaccatccattctccttccaaactgctcatacccagtattcccaaggtttttgcacatgtatataacagaatgtcaaagtagattcattgcaatctcagtttctgctcaggcccaaagattatagatgccagcgaggtcagatctcacagtaaggccatttctgcatgacttcaggagaaaatgctgaaaacctaatttccccacacccttggcctcttgtccacctgaaggtaagaaaggagtgttggggggaagggggagggatagcattaggagatatacctaatgctaaatgacgagttagtgggtgcagcacaccagcatggcacatgtatacatatgtaactaacctgcacattgtgcacatgtaccctaaaacttaaagtataataataataaaataaaataaaaataaataaataaataaaaattaaaaaaagaaaaaaaaaagaaaggagtgttgagattagaaggtattttttttcctattgggatacaggtggtgtttggttgcatgagtaagttctttagtggtgctttgtgagattgtggtgtagccatcacccaagcagtatacactgcaccccatttatagtcttttatccctcgcccccctctcacctttccccccaagtccccaaagtccattgtatcattcttatgcctttgcatcctcatagtttagctcccacatatcagtgagaacatatgatgtttggttttccattcctgagttacttcacttagaataatagtctccagagattagaagagtttttgttttgttttgtttctgtgtgtttgtttacgtaagctgttggtgtgctgtgagtcccatcctctgtccaccgtagatgtgtgatggaggatgacagtctcttcaactggacaattcagagtagttatatggggtgaggggcgggtccagagaggaatggggtctgatatggtttggctttatgtccccacccaaatctcatcttgaattgtaatccccaggtgttgggggaggaacctggtgggaggtgattgaatcatggaggtggcttctaccttgttgttctcatgataaagtgagttctcaggagatctgatggttttataagcgtttggcaagttcctcctttgcttgctcttctctctctcttgttgccttgtgaagaagatatttgcttctccttccccttctgccatgactgtagtttcctgaggccaccctagccatgtggaattgtaagtcaattaaatctctttcttttttttttgagactgagcccccctgtcatccaggctggtgtgcagtggtgcaatctcagctcactgcaacctccgcctcctgggttcaagcgattctcctgcctcagcctaccgagtaactgggacaacaggcatgcgccaatagccggctaattttgtatttttagtagaggtggcgttcaccatgttgaccaggctagtctcgaactcctaacctcaagtgatccgcccacctcagcctcccaaagtgctaagattacaggtgtgagccaccacacacggcctcggctatttatagcagtgtgagaacgggctaacacagggtctttcctcactggagagagagggtgggaggagagagagagggtgggaggggagagaggggagaggggagaaatgggggagggggggagaggggggagagagaatgaatatgagaatgaatgtaccaggagcttttatcctttgcaggagcgccacctggaggtaggaggtgaagtctgcagagagaagctggaaatgtactgacggatccccaaggattcagtaatgtgaccaagtggaggagctgcatttacaggcatcaagggaactgcaggtgagaggtctgcagccttgcaagagagtgggggaagcaggagaagctccacgtggggagataaaggaaaagctgaccacgcttcctccacgttgcaggcaacctgccgaaaggattttaatcactgagctgacactgtatttttttcttgtatgtgacttttttaagaagcagctggaagtctttatgacctaagatgactataaaaattatgagaaggccgggcgcagtggctcacacctgtaatcctagcactttgggaggccaaggtgggcggatcacttaaggtcaggagttcgagaccagcctggccaacatggcgaaaccctgtctctactaaaaatacaaaaattagctgggcgtggtagcacatgcttgtaatcccagctgctcgggaggctgaggcaggagaatcacttgaacctgggaggcagaggttgcagtgaaccatgactgcaccatagcactccaggctgggcaacagagcaagactgtctcaaaaaaaaaaaaagttatgagacttgctttacatgtcacccaagggcacaggtaaagaattagacctaggagttgggttgatagggcaatgggaaaaaagaaaaaaattgtttactgaatcaagggaataatcacacctacatctttgcaactcacgtgcttacaactagggcaaccaaattgttccggttcgcccaggattttctctggtttagccctgaaatttctgtgtcctgggaaattcctcatttctattttaaaaccgaaagtcccacatcctaagacacacacacacgcccctgcacacaccaatcctggtaaaacggtaacagttggtcatactatctacaacaaccctattcgagatctgtgtcttcacgatgaggaaaggcacatgcagttctggagattttaacacgtgttcccaaggtcacacaacctgcccttgtatccagcactgaaagcagatgactctcctctttccacgattctaagcctcttcccgtagcatgtcccatgtggaggagaaaagttaagaaaatgaaactggccaaaacttgctactgcatttgtgattttagaaagtaaatgatcagacattattaaaattatcaatgcaaaaagaaagtgagactgaacagattgtttaccttaacaagatcaagttaaactcgtatagggcttatatataatgccgcttaaaagctcaagtttatgcggggcagttttggtggaagaagctcaggcagtccctctggtggtcgttatagatctggccgtggaactggtggatatgaaaacagaaggttctaaaaacagcagaaaagggcaacagttcttagcaggagagacagtgaggaaagctgcaggttacttggagacagtcatcccaaatgcattagaggaggtgtaaaaatctgccacagaaggaacaatgatccatagtcagaaaagttactgcagcttaagcaggaaacccttcttgttcaggactgtcatagccacagtttgcaaaaagtgcagctattgattaatgtgatgtagtgtcaattagaggtacatccctgaggtctttaaaacaaaacaaactcagccaggcacggtggctcacacctgtaatcccagtgctttgggaagctgaggcaggcagatcacctgaggctgggagattgagaccagcctggctaacatggtgaaaccccgtctctacgaaaaatacaaaaattagcccggcatggtggtgggcgcctgtaatcccagctactcaggaggctaaggcaggagaattgcttgaacccaggaggtggaggtttcagtgagccaagatcgtgccactgcactccagcctgggtgacaagagtgaaactccgtctcaaaaaataaattaaataaataaataattagctggacgtggtggcaggcacctgtaatcccagctacttgggaggctgaggcaggagaatcacttgagcctgggaggtggaggttgcagtgaccagagatcgtgccactgaacgccagcctgggcaacagagcaagattctgtctcaaaaacaaaaacaaaaacaaaaaaaggctcaagtttatgaatgaactgttcatatcaggtgatggtctttcaaaataatgactgttttgtaccaactattgtgctcatgtgattgattgaacaatgcttccaaagaatttgaaacaataaggcaaagaaacctaatgttcataacagaaaaaaaaattaaatgtatagcactagaaaaattgatttttttttttttgagacagggtctcactctgtcacccaggctggagtgcagtggtgcaatgatggctcactgcagcctccacctcctgggctccagcgatcctcctgcctcagcctctagagtagcccggactacaagcatgcaccaccatgctcagctaatttttgtatttttagtatagacagggttttaccattttccccaggctggtctcgaactcctatgctcaagcaatcaacttgcctcagcctcccaaagtgctgggattacaggcatgaaccacagagcctggcatgatactagaaaaattctttttttttttttgacatttaagttcaggggtacatgggcaggatgtgcaggtttgttacacgggtaaacgtgtgtcatgggggtttgttgtacagattattttttttctagtgtatttactacttcctgattatcagattattttatcacccagttattaagcctagtacccactagttatttttcctgatcctctctctgctaccaccctccaccctctgacaggccccagcatgtgtgaaaaattcttatagtcttctagaaaatacaataggtagcctttggaacatagggtatcataaagagaagctgtagaaaatatatttctttgaatttttttttttttttttttttacaaatgatcactataatgtttaaaatatgtttaccacctacagttgtgtgctagggaagccataacaaaatgccccccactggggggcttatgggacagaaatggattttctcaccgttctgcaggctggaaatccaagatggaggtgccagtagggtcagtttctcccggggtctctctgctttgtatgcagatggccgccttcttgctgtgtctccacgtggtctttcctctggatgtacatatcctggtgtccttttcttttttttttttttgagttggagtcttactctgttgcccagctggagtgcaatgacacgatctcagctcactgcagcctctgcctcctggattcaagcgattcccctgcctcagcctatcgagtagctgggattacaggcgtgcaccaccgcgcccagctaatttttgtatttttagtagacatggggtttggccatgttggccaggctggtcttgaactcctgacctcaggcgatccgcccacctgggcttcccaaagtgctgaaattacaggcgtgagccaccacacgtagcccctagtgtcttttttatgtccaaatttccttttttcacaacggcctcttgtctctaaatacagtcacattctgagttactgggagttaggattcagcacacgaattttgaggagatgtaattcagcccataattaagccctatcctcatcagactgatgatctgtgctttctctgaactaacaggatttatatattcctttttaacagcaaggaactcaggttctccatggcccctttatgaagttgctcctgctggtacatgaccctcagttagtttcctgaagttatttacaaagccacctccacatgtgttgagcctcttcagtttacttcaaatcctgggcctgtgctgcatggcggtgctttccacagattcatatgttagatcttttctatttttttttctgagacagagtttccctctgtcgcccaggctggagtgcaatggtgtgatctcggctcactgcaacctctgcctcctgggttcaagcaattctcctgcctcagcctcctgagtagcagggactacaggcgtgtgccactattcccagctaatttttgtatttttagtagaggcagggtttcaccatattggccaggatggtctcgatctcttgaccccatgatcctcccactttgacctcccaaagtgttgggattacaggtgtgagctaccgcgcctggccacatattaaatctttttttttttttttttttttgagacagagtcttgctctgtcacccaggctggagtgcaatgatggatctcggctcactgcaagctccgcctcccaggttcatgccattttcctgcctcagcctcccgagtagctgagactacaggcacccgccaccacacctggctaattttttgtatttatagtagagatatgttagccaggatggtctcgatctcctgacctcatgatccacccacctcggcctcccaaagtgctgggattacaggcgtgagccaccgcgcccggcctcatgttaaatcttgacacccaatgtgatctgagaggttgggcctttggtgatggcagcagccactccagacggcttgctgctgccatgacgccacctgccccagggaggcccagcccgggctatacacgctatggagccgcagggagccctgccccttccgagttggggcgggagctcccagggtgatgctacagctgtccaaaccccagctgtggatccgagcctccctcagatcgtatcacatatcaagacttactcttgttgacaaaaagagtcaaactctataaaatatttgaagagatttattctgagccaaatatgataatgaccatggcccctgacacagccctaaggaggtcctgagaccatgtacccaaggtggtcggggggcagcttggttttatacattttagggaggcgtgaggcatcaatcaaacacatttgagaaatacattggtttggtccagaaaggctggacaatttgaaggaggcagggccttccaggctttaggtaaattaaaacattttctggttgacaattggttgagtttgtctaaagacctgggattaatagagaggaaatattcaggttaagataaaagattgtggagaccaaggttcttttgaagtcttatagtggctgcccttagagacaatagatgacaaatgtttcctactcagaccttcaaaagttgctagattctcagttaacctcctcaggattgggaggtcctggaggaaaaagatctagcaatgttaacagagatcctttacatatgcaaatattcccccccaccaaggacagctttgcagggccatttaaaaatatggcaaagaaacatgttttggggtaaaatatttttattttcttctttgttaggtaatgttatgccagagtcagattggaaagtaagtcacgatatatagggctaaataaaacccatctgatgagaatttatggtttgtagggcatgagaccccagaccccttagataagaatctgggcaagataaaaaaaaaaaatcagagctgagtcctcactatggtaattcagtgagtgtgactaccagcatagatgtccataaaggatatccattagggccacccattttaataatgtttgccaggacccttcaatcaaaacaaaatccattctcagaatagcttagaatcaaaggaggactttttgggtttttttggttcaagaaggattgggcaagaaaactgcagggagtgaaggaatgctgagctttggaagcaattagaaccaagaaaacaaaagctgaaagcactgttactcactcccgcttcccggatgctccctgagtcatctttgtgtttctccataaagactggcttcctccacatggcgagacagatggccaccaagaactcccaagcttaaaaaagaatgactctctgtggcaagaaaacaaagagacactcctccccaccttgctactccctatgtggcctccacactgcaacctgggactgtgtagtgaggggagggggagcgaagaagtttgcgttagtctgttttcacactgctgataaagacatacctgagactgagtaatttatttttatttttatttttatttatttatttttttgagacgcactctgtcacccaggctggagtgcagtggcacgatctccgctcactgcaagctccgcctcccggggtcacaccattctcctgcctcagcctcctgagtagctgggactacaggcgcccgccaccgcgcccggctaattttttgtatttttagtagagacggggtttcactgtgttatccaggatggtctcgatctcctgacctcatgatccacccgcctcggcctcccagagtgctgggattacaggcgtgagccactgcgcccagtcagtttactttttaaaaaagaggtataacggacttacagttccacatggctggggaggcctcacaatcatggcagaaggtgaaaggcacatcttacatggtggcagacgacagagaaatgagagagccaagcaaaaggggaaacccgttataaaaacctcagctctcctgagacttgttcactaccatgagaacggcatgggggaatgtgtgggtggaggattagccaggtgctgaggcaagagactgaaggcacaaactgttgcagtataataaagaaaatagaataagaatagtcataatacaaattagatgtagagatgatcatggacaattatcaatcattattataaacattattaatcattagcttttaatattactctttgctgcattactaatataacctaggaataaccggcgggtatagggtcaggtgctgaagggacatggtgagaagtgacctagaaggcaagaggtgagccctctgtcacgcgtgcatcagggccgcttgaggggtccttggtcaagcggtaacgccagtgtctgggaaggcacccgttacttagcagacggtgaaagggagtctcctttccttggaggagtcagggaacactctgctccaccagcttcttgtggaaggctggatattatccaggcctgcccgcagtcatccggaggcctaaacccctccctgtggtgctgtgcttcagtgctcacactccttgtccactttcatgctcctcccgtactcctggctcctctttgaagttcatagtagatagcggtagaagaaatagtgaaagtcttaaagtctttgatctttcttataagtgcatggaagaaaacgctgacgtatgctgccttctccctctctctctgcttcggctacctaagagggaagggccccctctcctgtgatcacacgacttgcttcaccttgtcaatcacttcgaagattcaccctgcttaccctgcccccttatcttgtatgcaataagtatcagcgcgcccagccgttatgggccactaccggtctccgcgtcttgatggttgtggtcctccgggcccagctgttttctctttatctctttgtcttgtgtctttatttcttacaatctcttatctctgcacacggggagaacacctgcaaagccccataggaccctgcaggaatccacccccatgattgaattatctcccactgggtccatcccacaacacatgggaattatgggagctacaactgaagatgagatttgggtggggacacagacacaagccatatatcaaggttgttccttcagatgcagcaatcctgggagcttctggttaggacaagatacaagcagagacagcttcatgggtattgtaaactcaatgtttgtgtcccgacaaaattcagctgttggaacctaaccccaaggtgatggtatttgtaatacgggagctaaaaagaaattattgaggcagacagtgagggtaagagagtcctcagtaaggtttcctattaataaagagcagcccccaaataatttcttttctaacagaaagcagcctgaaacatcaagctgcaagcatagataaacaagctaaaatcttgcatcagctgtgccaatagaaaacggatgcctgggagccgggtatattcaacatggaggttccctcttcccttttctttgtccccacatgtgcagtaaaaaagcagacaacatggccccggccaggcagagaccctacctacgtaataaaagattagggtgggatggccagcttctttgggggctatgcaaacgtcatacctggtccgactaatctctcaggccctatgtaaatcagacagcacctcctcaagcttgtctataaaagccccatgcatttcaccacaaaaccaggggtcccactcgggaacccctctcttctctgtgcaaaagagagaactattctcttttctctttcttttgcttattaagccttcactcttttttttttttttttttttgagatggagtctggctctgtcattcaggctggagtgcagtggcacgatttcggctcacttcaacctccgcctcccaggtgcaagcaattctcctgcctcagcctcccaagtagctgggatgacaggcacccaccactgcgcccagctaatttttatatttttagtagagatggggtttcaccgtgttggtcaggctggtttcgaactcctgatctcaggtgatccgccccccactcggtctcccaaagtcctgagattacaggcgtgagccactgcgcccggcccagtctctttcactatgtaaggacacagcaagaaggtgccagctatgaaccaggaaaaaagccctcagcagacactgaatctaccagtgctttggtcttggacttccagcctccagaaccatgagaaataactatgtgttgtctgtaagctgccaggtctttggtatgttgatagcagcctggatggactaagacactctctccttccctctcatgccctggaccctcatcagggccagaagtggttggggtgatggcccaagcagactttaaaaagcactggcctagcacaagggttggcacgctagagcccacagcttgtttttgcaaataaaattttttgtttttaaaacaactttctgggctgggcacggtggctcacgcctgtaatcccagcactatgggaagccgaggcaggcggatgacttgaggtcaggagctcaagaccagcctggccaacatggtgaaaccccatctctactaaaaatacaaaaaaattagcctggtgtgatggcagaagcttgtaatcccagctactcaggaggctgagacaggagaatcatttgaacctgcggggagaggttgcagcgagctgagatcacgccactgcactctggcgcctgggcgacagagcaagactccatcaaaaaaaaaaaaactttctatagatacataatatttatgcatatttatgacatacatgtgatagtttgatacatgcacagaatgtataatactcaaattagggtatttaggatattcaccacctcaaacatttatctttttttttatcttttcgagacagagtctctctctgtcgcccaggctggagtacagtggtgtgatcttggctcactgcaacctctgcctcccgagttcaagcaattcttctgcctcagcctcccaagtggctgggattacaggtgtgcgccaccacacccagctaatttttgtatttttagtggagatggggtttcaccttgttggccaggctggtcttgaactcctgacctcaggtgatccacccatcttggcctctcaaagtgttgggattacaggagtgagccactgcacctggctcatttatcgtttgtgttgggaatgtttcaaatcttctcttctagctattttgaaatatacaatatattgctgttaactatagtcacccttctgtgctattgaacacttgaacttattccttctatccaactgtgtttgtgcccattaactatcccaccccttctagcctttgataactgactctctctttaccttcatgagatctacttttttagctcctacatgagtgagaacatgaagttgtaaataaagttttattctaacaccgccacacctacttgtttacatatcagcgatggctgctttcatggtacaacagcagagtggggtagtctcagcagagatcctacagcccacaaagctggacgtgttactctctggtccttttgttttctgccctctggtctaggagtttgcagctctgggcgttttttgtttttttttttttttttttttgagatggagtctcactccattgcccaggctggaattcaatggcgccatctcagctcactgcaatctctgcctcctgggttcaagcgattcttctgcctcagtctcccaagtagcggggattacaggcgcctgccaccacgtccaactaattttttatttttagtagagatgggatttcaccatgttggtcaggctggtcttgaactctgacctcagatgatccacccacctcggcctcccaaagtgctgggatgacaggcgtgagcccggccgttttcttttttgcttgttgtgcttcctggagatgctcagtaattcttacattctttcctggatagctggtcaatcattatttattatttccttgaattgttctaggaggaaatgtggggtagaaagagtatggtggggttcttgggcatgaataatccataaataagtcagatttctttttaagacgagaaacttaattttattgatatggacgaagagcaaggaaacacagtatctgcatctccagatttccgataaccttggccagcacgatcccccctcctttagtggccagggctgtcttcttgctacactttcagtgccgcatattcatgagatcctgggggctcctgggtggtgtctgaagctgcctcagacagggcgctggtgcttagctcagcataggtcactccttgggggtctgccgtctttggagaaaatagatgaatattagaactgagtgttcaatatggcagccactagccacacatggctattgacatttaagttaattacaattaaatttaatttaaaacccaggtcctcggtcacaccagatgcatttctttttcttttctgtttttataaccctttatgcctgtgacatcaatggatctgcgtaagccttttttcattttttttaaatttttatttatttatttattttgggacagagtctggctctgtcgcccaggctggagtgcggtggcgtgatctcggctcactgcaacctccgcctcccgggttcaagccattctcctggctcagcctcctgagtagctgggattacaggcgcccactaccacgcccagctaattttttgtatctttagtagagatggggtttcaccatgttaaccaggatggtctcgatctcctgacctcatgatccgcccgcctcggcctcccaaagtgctgggattacaggcgtgagccaccgcgcccggcccatgcataagccttttaaatggagattttggttcccattaggggagtttcgtgacttgtctaagaccacatgcgtgataaacagtatacatttctgtatgggcttaaccaggaggcacacacgaccagcccattgtggtgagggagctcttgtgggactcctaagcgggaggactcaccgagagagataccctttccatattggataaatctgcctctgagtgagaaaggaaaaaaaaaaatcagttctcagctgcagaagtcagaacttagtctttctatccggtgattcccttaaacttcccctgtcccttaccggcagcctcctgctccggaagtttggaatggctggttctgaaagagagagacacacgtgaaaggatgggatgtgaagatttcggggagagggtgagggcaatggaggggagaggaagggagaagaagggagaggaggaaggtcacagaatgggctggggtgggggctcagggtgccaatcccggatgtgccaatgggttcccttgagaatgacatgggaataagtggagcatgagctatgccaagcatctacctcttggtggattcctcagatgatgaacctacaaaaaatgcaggaggaatttacctaccgagaaaatccttcactccccctctctccctttgcgttctctgagctcactgtgctggctgcatctgtagatgatgaagactgagaggaagaggagaaggatggagatgcagctgaagatggcgacaaagatggttctggtgtctggagggggaagagcaggtcagggaatcagcctggctcctgaaatccactgataggggcgagccgaaaagctaagagaagccagacagatggcctggcttccaagcctggatctcccacctcggagctggaacttcctattgctttggggaatttccttaatcttctccaagcttctgtttccccatctgtaaagtgaggatagcagcagtagctactttattggatggtgggtcagtacctatagaaagggctggaacagtgcttggcgcataggaaattccaaaaattcccagggaatgtttggtgcatagcaatgatattgatcatttattgtgagccagctctgttccaggtgctccatatatatatatacgtgtgtgtgtgtgtatatatatatataaatgtatatatatgtgtgtgtatatataaatgtgtatatatatatatatatatatatatatatatacatatatatatatatatacacacttttttttttttgagatggagtcgtgttctgtcacccaggctggagtgtgatcctggctcactgcaacctccacctccctggttcaaacaattctcctgactcagcctcctgagtagttgggattacaggcgtgagccaccacatctgtctgtgtaatcactgtctgaaatccactgatggggtgagtagaaaagctaagagaagccagacagatggcctggcttccaagcctggatctcccaccttggagctggaacttccttggagctggacatttcgaccaatagactttgagtaaagcagatgacccactgtcataggggtgggcctcatccaatcagttgaagactttaagactttaagagaaaagactgaggtcccccaaggtggaaggaattctgcctccagactcaagctgcaatatcaagtctcccctggatcccctgcctgcctgccctgcagatttcagacttgccagctccccacaatcacgtgaaccaatccattaaaatcaatctctctctccatatatgtatatacatgtatatgttctcttttttttttttgagacaaagtctcactcttatcgtccaggctggagtgcaatagtgcaatcttggctcactgcaagctccgcctcccgggttcaagcaattctcctgccttagcctcctgagtagctgggattacaggtgcccaccatcacgcccggctaatttttgtatttttagtagagacggggtttcgccatgttggccacgctggtcttgaactactgacctcaggcaatctgcctgcctcggcctcccaaagtgctgggattacaggcgtgagccaccacacccagcttatatctatatgttctattggttctgtttttctggaaaaccctggctaacacagacatgatctcagctcttaacttcaaacatatttcctttttctttttttaaaggagagagagagatgtgaaaggacgggatgtgaagattatggggagagggtgagggcaatggaggggagaggaggggagaggagggaggtcacagatgggagctcaggatgccaatcccagatgtgccaatgggttcccattgttgcccaggctagagtgcagtggtgtgatcatactcgaattcctgggctcaagtggtcctcctcactcggcctccagggtagctgggagtacagaccaccacgcccagccaacttcaaacacacttcaatgagctcgttgatgccaggtaatgaacagcagtgacacgggcatggaaggcgtttagagtggggaggggtggggctctctgaaggagacatgattccccaagacacagaacaagggatcagctgggagaattcagggaggattcctaataagaacagggttagagcagggtagaaaagaatgaccagtggccgggcacggtggctcacgcctgtaatcctggcactttgggagagtgaagtaggtggatcacttgaggtctggagttcgagaccagcctggccaacatggtgaaaccctgtctctactgaaaatataaaaaataagctgggcatggtggcgcacgcctgtagtcccagctactcaggaggctgagagaagagaattgcttgaacctgggaggcggaggttgcagtgagccgagatcgcatcactgcatcatacactcaactgaccaagactccaactcaaaaaagcatccctctcaggagataaaatttctaccaattaaaaaacaaaaacaaaacaaaacaaaaaaaactagttcttgagcaatattgccatgcaagtctacatcatagcgttttaaagtcttaacaacaaccctgcaaggtagtacaattatttccctcccactggtgaagggcatgcattcccgtgtgactcctgggattacagcaagggttgtgtccaaagctcacagcgttgaggaagagagagcaacctgttactaaagctaggcgacagagtccatgcagttcccccccgttttttgtttttcttggcactttagattcaagaaacacaagtcgtgagactttaaggagtaagtagcagaaacgtgattaaggaaaaaagttgagcaactatagaagtgaggccccagaaaggggcttcaccaagacccccgctatctttgttagtgtgctttgagtctgagaatttttcctaggtgtgcaatgatctgtggtcacattacagagccaagtctgagatgcttcacacgcctggtcctctgcaccaacagagggtctcccatccagacgcttcccctacttggttcgctatgtttgcattggcatttctacatatctatatatagagaattacctatctaatttatctatctcgctaatctatctaccatctgtctaggtatctattatctatctacctatctatctttatctgtctctgtacctacttacctatcatctatccaatctatccgtcctatctaattatgatttatctatctacctacttgcctatcacctatccaatctatctatcctatcatatgtaattaactatctgtctgtctaatttttctatcttgttaatctatcacttatctaggcatctatgtatctatctttatctgtctatccacctgcttacctgctgtctgtctaatctatccatcctatcatatctaattatcacttatctatctaccgacttacctatcatctagttaccaaatctatcatctatctaatgtatctatcaatcataaccagttatctatcatctatcatctatcatctgtatgtatctgtctattcacctactattatctatttaatctattctatctagttatctatctatctatccacctacttatctaatttttctatcttgcaactctatcacctatctaggtatctatgtatctatctgtgtatctgtatatctatctatctatctagctagctttatctagctacctagttacctatcatctatctatctaatctatcatctatctaatgtatctatcaatcatatctaattatctgtctatctaatcatctatcttatctattatatctagttatctatcatctagctagctagctaatctatctgtatctatctacctacttacctatcgtctatttatctatctaatctatcatatctagttatctatctacttacttatctaacctgttgtatctagttatctatctacctacttacctatcatctgtctatctatctaatctgtccatcgtatctagctacttatctacctatcatctatgtatctatctaatctatcatatctagttatctatttatctgcctacttgcctattatctatcacatctaattatctatctatccccctccctgaaataaggttctttctgagctgatcatcagggagcagcaaaaggagtggggagtttgaaacaagacatatttgagttctagtactgggtctcctacctcctgactttgtaaatgttcccttccctttctggaatacgttattttttggttaaatataaggagggggcagagagctaataatatctaacttgaagagttaggtaatgatgaaaaatcctggctttaaagcgctcagtctagaaactgactcattgtgtcggataatgggattgtaggtataatgatgattttttttcacccaatattccacctacacccatctctctctgtaatagattctgtcaatgttcctcaacccatgttccccagatccctttcccatttttatgcattctagatcgtggcttctttccctttccaaagtgaacatttgtatctcttctttgggggactgcctgggagaactccaaatgccttggaatttacatgcccgggacaaactgccactgacggctgtggggaccccagctccctagcctctggtcttcgaccttctctgtctccactgctttctgcaggatggagccaaagataccatctgagggacacagatatcccacacttgtttaatctattttcctcccagcccttcttccccactccctaaaatgtaattttcaagccaggcgtggtggctcacacctgtaatcccagcactttgggaggtcgaggcaggcagagcacctgaggtcaggagttcgagaccagcctgaccaacatggagaaaccccgtctctactaaaaatagaatattagctgggtgtggtggtgcatgcctgtaatcccagctatttgggaggctgaggcaggagaatctcttgaacctggtaggcggaggttgcagtgagccaagatcacgccattgcactccagcctgggcaacaagagcgaaactctgtctcaaaactaaataaataataaataaaataaaacgtcactttcacactaatgctgtctaagagcctgcttctggtggagctgaatcagagaacccctcaaaagcaacaatttttttttttttgagacagtctcactctgtctcccaggctggagtgcagtggtacaatctcggctttggaacctccccctctggggttcaagcaattctcctgcctcagcctcccaaggagctgggattacaagcacccgccacctcaccccgctaattttttatatttctagtagagatgaggtttcaccatgttggttaggctggtctcaaactccagagctcaagtgttctgcccactttggcctcccaaagtgctgggattacataagccaccatgcctggccataagcaacaattctatcagtgcatctccaaggacttatgaaaacagggcaggaacagctgctcctggactctcagtttccccagatggaagcagagaaacagcagccttgccttgtcctttctgttctccccttttccagcctacggtatctttcacacagcaattcactagaaatgagaagtacattattgcaaaattctcatcttcatatgaccccataatcagctgaactgggttcaccctgagatgtccacagatcctggccaaatgttgcatcagtatttgcaaattgccagaataaatcataacttgctacgctactaaagtcagcgtgagcaacaagatacagcctgacacggggcataaatggaggcacaggcaccagaaagaaagtcaagtcttgtgtgataaaattcatcttcattctctacattgcgattgaacatagagtcgttttctagtgtgttttaggcatataaatacaggctggggacatcatacctgtgcttacagatattttacttttattttatttatttactgaaacagggtctcgctctgtcacccaggctggagtgctgtggcgcaatcacagttcactgaagcctcaacctcctgggcgcaaacgatctttctgcctgagcctcccaagtagctgggactacaggtgcacaccaccacgcctggctaatttttgtattttttgtagagatgggatcttaccaagttgtccaggctggtcttgaacccctgggctcaagtgatcctcctgcctcatcttcccaaagtcctggtattacagacgtgagccactgcgcccggcaaagatattttattctgtttagaattgtgatgatacaaatttgaactcaaaaagtacattttaagaaattatataatacccactgggatggctataatttaaaaaaagaaaagtaagtgttgacaaggatgtggagatattggaacccacatatattactggaaggaatataacatgatacagccacaatggaaaatgatttggcagttcctcaaaaagttgaacataatagtcaccatatgtcctagcaaatccacttctaggtacatactcaagataatttacagcgcggagacaaacagatactcctaccacagtgttccagcaccattactcgctttagccaagaggtgcagacaacacaaatgtccatcaaaagaagaacggggccaggcacagtagctcaagtctgtaatcccagcactttgggaagctgaggcgtgtggatcacctgaggtcaggagttcgagaccagcctagccaacatggtgaaaccccctctctactaaaaatacacaaattagctaggcatggtgacgggcgcctgtaggtccagctactcaggaggttaaggcaaaagaatcacttaaacctgggaggcggaggttgcagtgagctgagattgtgccactgcactccagcctgggcgacagagcaagactccgtctcaaaaaaacaaaaacaaaaacaaaaaaaagaatggataagcaaaatgtggtctatccatacaatacgatgcttttcaccatgacaagaaatgaaacattgatgcatgctacagtacagacaaactttgaaaacattatgctaaagagaaaggagctagtcacaaaggatcacatagtgtatgaatccacttacacaaaatgtccagaatagacaaaatcatagacacagagaagcatatgaatggttggaagggcctggtgggaaagtgggaaatgaggagtgactgcttaatgggtacaagattttcttttagggtgatgagaatgttctggaattatgtagtggtgatggttatactacctcatgaagatacaaaatgccagtgaattggacactttacaagggtgaatttttggactgtgaattatatatcaataaaaaaagaaagaaaataaatgatacaagagctcaaaatagaaaagcttctcttcctcctccccctcacacctcactagatctcccacctcgtttctgatacttctgtgttcctctctcccattagatttcatatctttctcagaaaacgttcctgacgtgaattgtgttcgtagtgctagggtagcagacatttcccaagcctactatcatggaataaaaacgtttcaaatagttatcttgcaagaacactttggaggatacctttttgaaaaccgattataccagcacagactgctagcaacaaccttcagcaactttggctctttggagtaggttgcaggaagattatgacttgctgaaaggaaggatgattaagcatctagatgccaatttatattctgcatttggcccttaaagtctggatgagttcctgtttcagccgaatgctgccaaaagctctaactttttaattttttttttttttttttttttttggagacagagtctcactctgttgcccaggctggagggcagtggtgtaatctcggctcactgcaacctctgcctcccaggttcaagcaattctcctgcctcagtcacttgagtagctgggaatacaggcgcccaccacaatgcccagcaaatttttgtatttttagtagagacagggtttcaccatgttgcccaggctggtttcgaactcctgacctcaggtgatccgcccacctcggcctcccaaagtgctgggattacagatgtgagccacctcgcctggcccaaaagctctaatttttatgagaaactctgaggacagaatcttagtcaattgttaatgaataagcaacattagaaaaaaaattcaatattcacctatttttgagaattttagagttataacaaactcttgattatatatattcctgaagtacctactctgcgtaggtcctggtcctactccccaaatgggtcactgaaaaattcacccccattattccccaaatcccaccctagtttttcatcatgtcatatggcaaacaacgcactctgtgctgttttacacaccagcttcttcagaacccggaagcactttagaggttatctcccctcatcctccaccccccaaaacacagcagtttccccaataacattgagaaaatgggctttaaagttcttctaggccgggtgcggtggctcatgcctgtaatcccaacactttgagaggccgaggcgggggaattgcttgaggtcaggagtttgataccagcctggccaacatggtgaaaccccatctctactaaaaacaaaaaacaaaaaacaaaactgagctggatatggtggtgggtgcctgtaatcccagctattcgggaggccgaggcaggagaattgcttgaacccagaacccaggaagtggaggttgcagtgagctgagattgtgccacttcacgccaccctgggggacagaacaagactctttctcaaaaaaataaataggccgtgtgcggtggctcacgcctgtaatcccagcactttgggaggctgaggcgggcagatcacaaggtcaggagttcgagaccagcctggccaacatggtgaaaccccgtctctactaaaaatacaaaaattagctgggtgtggtggtgcgtgcctgtagtcccagctattcgggaggctgaggcaggaaaattgcttgaatccgggaggcgaaggttgcagtgagctgagattgcgccactgtactccagccttggtgacaaagcgagactctatctcaaaaaacaaacaaacaaacaaacaaacaaataaataaagttctccttgtgcactttaagcaaaggtgatcatgaagcagatctcattgggaaaaacatctcctttctaattatcttacctgttttcattgagggagcttcaagttcatcgtgtttatctagaaaataggagggaagaaaaggaattacactaatcatacaggaaccttggggacaggagtcctcacgtcctacttatagacatcctgttcttctttgggaagcagaaaagagaatggcttctccattccctagatgctccctgggtcctcagagcatggacagagcctcagattactcttcttaatagtcctggagtttgatagtatttttaataacaaaaatatttatgaatgaccctgctaacgccccctccagtttgattccttgccagtcttctctatcttgacaaagaacaccattcacccaaattctttctttcttttattttttttgagtcttgcactgttacccaagctggagtgcagtggcatgatctcagctcactgcaacctccgcctcccgggttcaagagattctcctgcctcagccttccaagtagctgggactacaggcgcccgccaccacaccctgctaatttttgtatttttagtagagacagggtttcaccatgttggccaggctggtctcaaactcctggcctcaagtgatcaacctgccttggccactcagaatactgggattccaggcatgagccactgcacctggcctatatttctatctccacagtggcaccatttagtctaagttaaaatatcacctacttggccgggcgcagtggctcacgcctgtaatcccagcactttgggaggccgaggcgggcagatcacaaggtcaggagatcgagaccatcctggctaacatggtgaaaccccgtctctactaaaaatacaaaaagttagccgagcgtggtggcgggcccctgtagtcccagctactcgggaggctgaggcaggagaatggcgtgaacccgggaggcggagcttgcagtgagccgagatcgcgccactgcactccagcctgagggacagagccagactccgtctcaaaaaaaaaataaaaataaaaataaaaatgaaatgaaatatcacctactcaccagtccctggcaaccaccagttgcttctgtgagtttggcttttttagactacacatatgagtgagatcctgcagaatttgtctttctgagtctggcttattttgtttagcatgatatatgcggagatgttgatgaaagggtataagtttccagttctaagatgaagaagttcaggtgctcagcatggtggcaatggatgtgctaattaatttgactgtgataatcattacacaatgtacaggtggatcaaatcatcagattgtataccttgaatatatacaatcttcatttgtcaatttgatatttttaaatttaaaaagtcgtattgcctgaaacgcaccaactcttactacatctagtcccttattttccaaaagcagccagaggccgggcatgatggcctgtgcctgtaatctcagatgcttgggaggctgaggtgggaggattacctgggcctgggaggtcaaggctgcagtgagctgtgattgcaccactgcactccagcctgggcaaccgagtgggaccctgtctcaaaaaaaaaaaaaaaaaaaaaagcagccagtgacccttccagcatataaataaaatcatgccatcctccagctcaacttcatcagtgggttcctgttctttcaaagcagactctaggaccagttcaaacacccacaagatcctagatgctctaggccctgccttatgtcctcctttctgtgtctcaatcattccaggaacactcacacttctgagactttgcttttgctgctctctctccctggagggctgttctccagatatcggtgtggttgggtcattctcatccttcatgcttgtggcagatagaccctaagggggcactcaggagactcaggagccctgcttcctggtgttcatgcctttgtctaatcccctcaccttgagtgtggagatctgtgactttcttctcaccaatagctatggcaaaggtgatgggatgttatgctcttgattatgttacattacataaaactctgtttgctagggcatttgctctctctttcttctctctctctcaatctctcttcttgcaagtgctgcagaatcattctagcatgaatcctacagctataaagaaccagatattgctatcaaccacaggagtggagaaatggacccttccccagtcaagcctccagatgagccagatgagaacacagcccttgttgacaccttgattgcatccttatgagacccaaagcagaggactcagctaagctgtgcctggactcctgacccacatcaactgtgagataataaataggtgtttcaggctgctaaattagtggtaatttgttatgcagctgtagatcactaatacaatgcctctcacagttattctccatctataatgtgttttttaattactctgatagcttgctcttatttctttctttcttccaaagaagaatgtgagctcctgttggccagagacctggtctgtctcagttcctacaatatgctcaggatctaccaaagtatctgaatttgtagggtgaatgggcagctatttttgtgccaggtattttgcattaatttttttttgtaatggaagcatttatatgcccattttgtaataagtaaaaagtagtataataaaaaagtaaaaagtagtataataaagtgatttgcaaagcagcaaacagattgtatatggaaggctgacctggaaaatcaaccactggaaattgatactatagcctgtcttgtgatgtaatggtacagctgcgatagaggtgaagaaatcaggaaacagtagatgatatgccagagaacataattgggaaatggcaaataatcgcgaggcttttagggctaaagtgtgggtgcagaaattcttaagactacaagaacgagttatggggaatacaatttgaaatcaatatcaaagtgatgagcaccttgttggagtatcattgatcaagagcctcagaaagagggtaaatcagaggtgaaacattaagtattcagttactcatcatgccccaagcccaggctaagtcattggtgtggacccacggctacttctacactacactgatgactgtaaagtctctccagggatttcccatgatatggcaggactgacctactggaagcaactgtggtcagttgagaggtattgtttagtgactaataaatgaatggatgaatggatggatggatggatggatggatggatagatggataggtgggtgggggtgagtgaatgggtgaaagggtggatgagtggatgaatgggtggaaggatggacaaatgagtggctgggtaaatagatgggtaggtaggtagatagatggatgaaggggtgggtggacagatgaatggaagggttggtggttggatggattaatggatagatgaatggatggatggatggatggatggatggatggatgagttgatggatagatggataagtgagtggatggatgggtgaatgagtgggtaggagggtggatgggttggtaggtgggtagatgggtgggtgggttgatagatgggtgggtagattgatagatggatgggtgagtagataaatgggtagatgaaagtgatgcaaaattattctttatccctcttccttgggatctcaagtcatgtatgttacaatcctcccacgtgcatcttctcactgtggtcctcatcatttttttttcagttacctgcaccgtgcctcccatacttttccacacaatgggatctcttagccccacaatccattatttgccattcctacatccctcatagagcactggacactctttctggctttccttctctggcataatgaaatataaattttcatttatgtctgaatagcaactgtgaagctcattgtttttgtgacaccggggaggtcacctaatctctatgagcaaaaagaagttagtaacacaaccaccctcataggaagtgaagactgaatgagttagtggaggcaagttacctgtcgtggagacaggaacatagaaaatgctggatacatgtcaaatgccagtgttatcactctatcctcacctgtcacccagatctccagcttgttgctggggaaggaggccaagtgtgatgagttgctcaggtaatacacacagctgtagtttccactgtcattacttgtcacgttccagagcatgaaatcagtctggttttttcttacttgcctgacttgtaatggttctgggatccccattttcaacagagcaattacaatacattcggttccattgtatggagtgagacatcgaagtgtcctgagacctggagtcatcccagggtctacattgactgagagcaaaggttctgggagtgatcctgaagaggacaaggcaatggaggtaaagagaagggccagggcttttccattttctactgcacttggggactatctcatccatctctccgtattaaccatgtctttcatcttctgcatttgatgctttaacatcttggggccttgctgcccttggtgggacctcccctcgcagggttagttaatttctagagccagtaaacaacttgtcctcaaggatgtccctcaaatgcaagccaatagatccagagcccatactctcaaccaccttaattatggggctctcacactcaaggtcaatgttgtcctctcctaatcaccccaggtccaagaactagacaaccagggacagcctctacaccccaaagccaattctttttttgtttttcttttctttctttcttttcttttcttttctttttttttttttttttttttttttgagacaggttctcattctatcacccaggcttgagtgcagtggcacgatcttggctcaccgcagcctctgcctctggggttcaagcaattctcgtgcctcagcctcccgagtagctgaaagcacaggtgcacaccaccacacccaggtaattattgtatttttgtagagatggagtttcgccatgttacccaggctgatgtcaaactcctgacctcaggtgatccaccctcctaggcctcccaaagtgctaggattacaggcatgaaccaccacacctggccaactctaatcttgttctccccacaaaatacaatcaaagctctggtccacagttcttcctcctccctctgcccctcattgaccctggtgcttccccacatactccccccagtatagccttcctcctcctcttgggaactgtaacagaccatcttttccatggcaatcatcacttggtctgtcagtcttaccataccccaattttctattaactgaccatattctacaccaccctcccacatccacatcattgggaccctctcagaatctctgatgagaatcttgctccacattcggttcccatttccacattgaaggtgttgcatctatccttcttcttcttttttttttttagacggagtcttgctctttcatccaggctgcagtgcagtggcacaatctcagctcattacaacctctgccttctgggctcaagagattctcttcctgcctcagcctccctagtagctgggattacaggcgcctgccaccacgcccagctaatttttgtattttaagtagaggtgaggtttcaccatgttggccaggctggtctcgaactcccgacctcaagtgatctgcccacctctgcctcccaaagtgctgggattacaggcatgagccaccgcgccgtgcctggcctgcatctatctttttgtctcctagattccttcttccccagccatgtcccacgacaggaaaagaaatacgtgcatcaggcaggctttggtgactcacgcctgtaatcccagcactttgggaggccaaggcaggaggatcacctgagctcaggagttcaagaccagcctgggcaacatagatcctgtctcaacaagtaatttaaaaattagccaggcatggtggtgcttgcctgtactcccagctacttgggaggctgatgtgggaaaatcgcttgagcctgggaggtcgaggctgcagtgaattgtgttcatgccactgcactcctgcctgggtgacagagcgagattctgtcaaaaaaaaaaaaagcagccgagcgcagtggctcactcctgtaatctcagcactttgggaggctgaggtgggcagatcacttgaggtcagcagttcgagatcagcctggccaacatggtaaaaccctgtctctactaaaatacaaaaattagccaggtgtggtggcgcacccctgtagttccagctactcgggaggctgaggcaggtgaattgcatgaacccaggaggcgggggttgcagtgagctgagatcatgccactgtactccagcctgggcaacagagcaagactccctctcaaaaaaaaaaaaaaggctgggtgtggaggttcacgtttataatcccagccctttgggaggccgaggcagatggatcacttgaggtcaggagtttgagatcaacctcaccaatatggtacaacctcatctttattaaaaatacaaaaattaggccgggcgcggtggctcatgcctgtaatcccagcactttgggaggcggaggcaggtggatcacaaggtcaggagatggagaccatcctggctaacatggcgaaaccccatctctactaaaaacacaaacaattagctgggcgtggtggcgggcgcctgtagtcccagctactcgggaggctgaggagggagaattgcttgaacccaggaggcagaagttgcagtgagccgagatcgtgccactgcactccagcctgggagacacagcaagactctgtcttaaaaaaaaaaaagcaaagccaaaccaaagaaatgtgtgcatcaaagagtacatctgcccttctcacctgtgaccaccagctgcaagtgttcactgctttctgaccactcatgggaggctgttgtcttgtaggcacaaaagtacctcccagcatccttaggcttcaggtccgtgaaggggaattcagcttcgttttctgccgagctctgttcctgcttgtacccagagtcgttcaccttgcgcagcacaaatgtcacattctgggaatgagcctgacacttcagggtcacattgctctcggcttcaaccaccgagctgggccaggcgtggagggagggcttgggcggtttctctggaaacaattcagagttaatttgagtctagaattcagacgattaaaggaaaaggtcatgaagcgtgggatgcaggaataaaagtttaagtaggagaaaactcaccattctttttctcatcttcgtagcccagacacagccctggaagagaaatctcaatgagagaaaaattatgtgcttgtccttgagtacaaatccagcagagaacgtatgactagctctttataggtctgagatatatatatatatataatgtatatatgtattatatataataaatgtattaagtatatgtacacatattacatataatacatatataaatataatatatatattaaatatatgtattacatatatgtatatatttttggcagatatctccccagacttacctcttacttttgttccattgtttgtcattcagaagctacgtgtatggagaaaattccagcaacttcttctttctttttttttttttttttttgaaatgtagtcttgctctgttgcacaggctggagtgcaatgacatgatctcagttcactgcaacctccgcctcccaggttcaagcaattttcctgcctcagcctcccgagtagctgggactacaggcacccgccaccacacctggctaatttttgcatttttagtagagacagggtctcaccatgttggccaggctggtcttgaactcctgacctcaggtgatccacacgcctcggcctcccaaagtgctgggattacaggcgtgagccactgcccccggcccagcaaccttttctgatgtattgaattgctttcatgagtaatcctttcaccatctagaaattgttcaacattcacctatgcttttttctggtattttctgtgattgcagtgttttgttttgttttgagacagagtctcgctgtgtcacccaggctggagtgcagtggtgcagtctcagctcactgcaacctcctccaccccctgggttcaagtgatactcgtacctcaggctccagagtagctgggactacaggtgtgtgccatcgtgcccagctaatttttgttgttgttgttgtagagatggggtttcaccatgttgcccaggctggtctcaaactcctgagctcaagtgatccacccgcctcagcctcccaaagcgctgggattacaggcatgagccaccgtgcccggcctgattgcagttttacccttgccacttaaataatgcaaaggttattttatcgtggagtgagagtggtgggttttttttttttttttatttttcgagatggagtctcgctctgtcacccaggctggagtgcagtggcgcgatctcggctcaccgcaagctctgcctcccgggttcacgccattctcctgcctcggcctcccgagtagctgggactacaggcacccgccaccaagcccagctaattaatttttttgtatttttagtagagacggggtttcactgtgttagccaggatggtcttgatctcctgacctcgtgatccacccgcctcggactcccaaagtgctgggattacaggcatcagccaccgcgcccggccgagaggagggttttcttgctcaattccaatagagagaatctgctcccccttccccgtgtcttctggtcccaaatactctcctcactttagctttggtttccacttacattatcccctccctcttctgtgttctgttctctacattccccgctgggaaggtagcgtcttaaacttgggtggaaaatgggatgtcagtcatggggcttgtttcagggtgaagttacgtagaatttaggtagaaattctctagagccacgacagtgtctcaggacattggttccttgttgacacaggtgccgatacagaacgtgaccccccaccaagcttcaccacagaggaatgaggtggaggcctcacgatggaccgaagctgcgttggcagcgagattagctgggattggcaggtaggaaacagcctctgggtgggcagggcatcccaggactcaggctctgttttgagaccctccccaaatcccgcttttagattcatgtcatctcatctctgctatccacccatcgtctgttcaaacagtgattcctatattcttttttctttttgagacagggtctcactctgtggcccaggctggagtgccagggtgcagtcacagctcactgcagcctcaacctcctgggctcaagtgatccatccatctcagcctcccaaataactgggactacaggcatgcaccaccacgctggctgattttaaaatttttttgtagagatgaggactcacgatgttgcccaggctggtctcgaacacctgagttcaagtgattctcccaccttggcctcccaacatgctgggattacaggtgtgagctacctgcacccagcccaattcccatattctttttcttttctttttttttttttttttttgacatggagtctccctctgtcacccaggctggagggcagcggtgctatcttagctcactgcaacctctgcctcccaggttcaagcgattttcctgcctcagcctcccgagtagctgggattacaggtccttgccaccatgcccagctaatttttgtatttttagtagagacggggtttcaccatgttggccagtctggtctcaaactcctgacctcaagagatctgcccgcctgggcctcccaaagtcctgagattacaggcgtgagccaccacacctggctgatttgtgtttcttgaaaagagaagttcaagttgtaactcccaggacctgcgaatgtgaccttatttgaaaatagcattgtctgatctttgcagatgtaattaattaaactaagatgaggtcatactagagtaggctgggtatctaatccaatataacttacaagaagagaaaaagagagacagagacacacagaaggaagacggccatgcgaagacagaggcagagaggccaggctgcaatcatagtgctttgggatgccaagataggagaattgcttgagcccaggagttggagactagcctgggcaatatagcaagatcccatctctaaaacagaaattattttaattagtccaacatggtggtgtgcacctgtagtcctagctgctcagaaggctgcggggaggactgcttgagctcaggaggttgaggctgcagtgagctatggtggtaccactgcactccggcctgggcaactgagtgagaccctgtctaaagaaaagaaaaaaaaaaacagagccaacgattggagtgatgcatctacaagttaaagaatgccgggagcgctggctcacgcctgtaatctcaacagtttgggaggctgaggcgggcagatcacctgaggtcaggagttcgaggccagcctggccaacgtggtgaaaccctgtctctactaaaaatacaaaaattagccaggcatggtggtccatgcttgtaatcccagctacttgggaggctaaggcaggagaattgattgaacccaggaggtggaggttgcagtgagaaagatcatgccactgcactctagcctgggtgacagagcaagactccgcctcaagaaaaaaaaaaaatgccaagaattgtcagccatcactagaagaggggcataaaacagacgctccttcatagttctcagaaggaatcaacattgcaaacaccttggtttcagacttctcatctccccaacttaaagcaattctaattcctttaagccaccaggcttgtagtactttggtatggcagccattgggggatgaggtcagtctcctggttgcccagcttactgtgctcagcagctggaggcttgggtatgaacccgatagtcatctctaaggcacaaatagccgggtgcagtggctcacacctgtaatcccagcactttaggaggttgaagtgggtagatcacctgagttcaggagtttgagaccagcctggccaacatggtgaaaccccatctctactaaaaacacaaaaaattagccaggcgtggtggcgtgtgcctataatcccagcttctcgggaggcggaggcaggagaatcgcttgaacccaggaggtggaggttgcagtgagctgagatcacaccactgcactccagcctgggagacaaagcaagactctgtcaaaaaaaaaaaaaaatgctcatctaaggtgcaaatgtgtgtaggagacgagcattaccccacaaggaagggctgcacccagaaaaggaggaaggaactgaagcagacgaagcacgtcgatgtccaccgcaccccccgtgcaccagggaggaactggggccttagggaggtggagctctgctgggtcaagcctagagtttctatgtagtaaagccgagattataacccaggtcatccgtttcacagtgtgagctctgtctgaatacatcaggttcaattggaggatggttaaaatcagcctaagaatcgagctggtcagaaaattgtcttcttggggccaggtgtggtggctcacgcctgtaatcccagcactttgggaggctgaggcgggcggatcacctgaggtcaggggctcgagaccagcctgaccaacatggtgaaaccccgtctctacttaaaatacaaaagtcagccgggtgtggtggcctgcacctgtagtcccacctactcgggaggctgaggcaggagaatcgcttgaacctgggagacggaggttgcagtgagcccagatcacgccattgcactccagcctgggctacagagtgagactctgtctcataaataaatgcatacatacataaataaataaataagagagagagagaagaaaattgtctttttgcccacagccttgcaccctgtagatccctaagcccagccctcctctattccgacggaggatgatggcagtactgcggtatttagcggctgcagactcggagaccccacagcagctctgcctttcccagcggagtctgtccccgtgtctctgcagcgcggcctcctcctcgcttgcatgtgggcggcagaactcacagaacccacagcccagacccacccaccgcaggtgtgcaacacctggaagtcattacttccacacaccgcatttccacctggactgccactcccacatgagtttttctcaccagcccaagcccattcgtcccagtcctggagactcaccgaggcaaagcagggagaggaattctgcggtcatagcgtcccttctgccagaaccaaggccccgccttgggttttacccttcaaaggcggagcgggactgggccggccgcagctctccggctgcccggttcgtccccaggatgtgcagatagaggaggttttgctctgacactctggttctctgccccactcttgcagtttccttctcacaaccgactcaggaaacaagaagccgtcgatgataacttcttccccatgaatccggtgtgtgtggccccacccgcccgagctctgtcctaccttatctgaagttctgccaagagttttctgtaaatgtaattttttattttaaaacactaataccggccggacgcggtggctcacgcctgtaatcccagcaccttgagaggctgaggcgggcggatcacctgaggtcgggagttcaagaccagcctgaccaaaatggagaaacccccgtctctactaaaaatacaaaattagccaggcatggtggcgcatgcctgtaatcccagctactccggaggctgagacaggagaatggcttgaacccaggaggcggaggttgctgtgagccaagattgtgccactgcactccagcctggacaacaacggtgaaactgtctcaaacaagcaaacaaacaaacattaatacctatagctttatagcttccgtgtacccactagccagctccccacaatgttaacctttttttggggggcgggggggacagagtcttgctctgtcacccaggctggagtgcagtggcgcgatctcggctcactgcaacctctgcctcatgggtttaaggattctcctgcctcagactcccaagtagctgggattacaagcatgcaccaccacacccagctaattttttgtagagatgggatttcaccatgtgggccaggctggtcttgaactcctggtctctagtgacccgcccacctcagcctcccaaagtgctgggattacaggcataagccactgtgcccggccaatggtaatctcttataattacagtactttttttttttttttttttttttgagacagaatctctgtcagccaggctggagtgcagtggcacaatcttggctcactgcaacctctgcctcccgggttcaagcgattctcctgcctcagcctcccgagttgccgggatgacaggtgtccgccaccactcttggctaattttttttgttctttttagtagaaacgaggttttgccatgttgcccaggctggtctcgaacttctgacctcaggcgatccgcctgcctcggcctcccaaactgctgggattacaggcgtgagccaccacgcccggcgtatggcacattttcaaaaccagagactttgcactggcatcacacgtttaaccaggttccagaggtcactcagatctcaccagtttgtgcataattcgtttctctttttctcttcctcttccttctatttctatttccttttctccttttccttcttttctcctgctcttcctcctcttccaccttcttttcctcctcccttttctttgcctatgggtatagttctgtaacattttattgcctgtatgtatggctttatagaaccaccgccacaatcaagacacagaactgtcccaccaccacgtaggaactccctcatgctgcccctttataatcgctctcccaccctagcacctgctaatctgttctacgtctctatcactttgtcactttgagactcttgtataaatggaatcgtccatcgcctcaccttctgagggtgacctttttcactcagcacaatgcctgtgagattcattcaaatggttgtgtgttatgatgatggatacattagccgggcgtggtggcacacgcccatagtcccagctactcaggaggctgaggcaggagaatcgcttgaacccgggaggcggaggttgcagtgagctgagatcacgccactgcactccagcctgggtcacagagcaagactccatcaaaaaaaaagaattatctaatggatacaatgtgtgtcactgggttagtggatacctgaaagccctaacttcatcattttggaatctatccatgcaataaagttacacttgtaccccataaacgtatacaaataaaaaataatcgtctgggcatgatgacttaccgctgtaatcccagcactttgggaggctgaggcgggattacaggtgtgagccaccatgcccggcctatactttctatcttaataactacaaaaataataacttgctggatgggtccctgtgcccaccccgtcctgtcctaagtgaggaggatgggaagaaagccatcgtcctgtcctggtgcggctctcaaacagctggaaatgctggctgcacaggaaactctaaggatcggcagctctagcgcatgctacccttggcagctgtgtggtctgtggatagagaaggaccaacctgtggttagtggaggaagaggaggaatattgctttgataagcacatcctcagagttataacagaggagacaatagttataaaataagaatgatatttacgaaaaataataagactattaacaagaaacagcaacaaatcttgaaaacaaaatgtaacaacaaaacataaatgttgactttttttttttttttttttttgagacggagtctcgctctgtcgcccaggctgcagtgcagtggtgagatctcggctcactgcaacctctgcctcccgggttccagcaattctcctgcctcagcctcctgagtagctgggattacaggcatgcaccaccacgcccagctaatttttgtatttttagtagagatggggtttcaccatattggccaggatggtctcgatctcttgaccttgtgatccgcccacctcggcctcccagagtgctgggattataggcatgagccacagcacctggcaactgttgacattttacatctgcaccagtaagactggctaccaattacaagcaaatggatgccatggatagaatggaattcctgccaaactgggtaaaatgttggaaacatataaaataaaatgtaaaagaaatgtattataaatacaggctgggcgtggtggctcatgcctgtaatcccagcactttgggaagccaaggtgggcagatcacttgaggtcaggagttcgagaccagcctcgccaacatggtgaaaccccgtctctactaacacacaaaaattagccaggcatggtggtgggcgcctgtaatcccagctacttgagaggctgaggcaggagagtcacttgaacctgagagggaggttgcagtgagctgaaattacgccactgcactccagcctgggtgacagagtgagactccctctccaaaaaaaaagaaagaaagaatgtattataaatacatatgaccaagcacagtggctaacgcctgtagtcctggcactttgggaggccaagatgagaggatcacttgagtccaagagttcgagaccaagttgggccatatggtggaacccggcttctacaaaaaatacaaaatttagtccggcatgatggcacacacctgtggtcccagctactcagaaggctgagatgggaggattactttagcctgggaggtcgaggctgcagtgagccgtgatctagccactacactccagcctgggcgacagagtgagaccctgtctcaaaataaataaatataataaataaataaatatgtatatcccaatattggactaaatgctggtccagaagcacaaaatagaaagaacggagaggaagtattaataaatattacacaggaagcaatgtttttcccttcgtgtggaggaagagttccccgcaggtgagagtcacctactactcaatctgactctgaagttttaagtattgattcaagttatcaaaaatgtattaagggctgggcacggtgactcaagcctgcaatcccagcactttgggaggccgaggtgggctgatcacttgagctcaggtgttcaagaccagcctggccaacatgggtgaaaccccatctctactaaaagtacaaaaattagctgggcatggtggcaggcgcctgtaatcccagcgacttgggaggctaaggcaggagaatcgcttaaacccaggaggtggaggttgcagtgagccgagatcttgccattgcactgcagcctgggtgacagagcgagactccgtctcaaagaaaaaaaaaaaaagtattacgtggctcattgtgcccaattctgtcctctgtccccagtgaaaagtacaggaagaagaaagccaccatcctgccctacagcagatcccaacagagctgagagtgcaggttccacagaaagcggttaaggctcagctggtccaacccatcattccctgggcagctgtgggatctatggctagagaagaacagagctgagcttagaggggaaggaagaggaggaagattgttttctcccggcatccaaacacagcttttcaaccagggggagcaccaccctcacttcccatcgccccatccagggatatttgaaaggtatgagagtagtggcttttttgttgttgttgtttcacaataattaggtctccaacaggtgttcaatgggaaaggaagtattagcaatgtcgagttacgtgttcctataatggacaagacagtctcacatggtgaaggactattgcactttaaacaccatttgtggccatgcccggtggtgcacacctgtaatcccagcactttgggaggctgaggcaggtggatcacttgaggccaggagttcgagaccagcctgaccaatgtggcgaaaccccgtctctcctaaaaatacaaaaaaattagccagatggtggcaggtgcctgtagttgcagccacttgggaggctgaggcaggagaatcacttgaacctggcaggcggaggttgcaatgagccgagatcgcaccactgcactctggcctgggcgacaaagcgagactctgtctcaaaacaaacaaacaaacaaaaaaacaaaaaataccatttgtgcccatgtggagaaacgtgtgaagtccccatggtagagtctgatgtttaaagaaccccatatggattgaatgcacagcagggcggctacagttcacaaggctgcactgggtaattacaatttgctaagaaggtggatcttaaacagaaaggtccataagctagattgagataaccattgtcacaatgagtgaaatttcttcctcggcacacaattaattacttagttagtaggaaagttcccagaaggtggatcttaaacagaaaagtccattagctacattgtgataatcatgtcacaattagtgaaatttcttctttggtacacaattaattatttagtagggaggttcccagaaggtggatcttaaacagaaaggttcgttagctacattgtgatactcatgtcacaatcagtgaaatttcttccttggtacacaataaattacttagtaggagggttccccacccgtaggcttatgggggtataattgataaatcaaaatggaatatatcaaaacatcacgttgtacacaaatataactccatttttatttgtcgattagatctcaataaatctggagcagaagagaattccatatctctacagcagcccatgaaagagagaggggatccgtgttttaacttggatctgttactggaaaggggtcccagtccagaccccaagagagggttctcggatctcacacaagtaagaactcagggtgagtacacagagtaaagtgaaggcaagtttattaagaaagtcaaggaatatggctgctccataggcagagcagtccagagggctgtcagtcggctatttttgtggttatttcttgatcgtatgctaaacaaggggtggactgttcatgagttttccaggaaaggggaggggatttccctggaactgagagtccctccctcgtttagcttctggaagttgccatggcatctgtaagctgtcttggtggcggtgggagtgtcttttagcatgcaaatgcattataattagcaaataatgtgcagtgaggacgaccagaagtcacttttgttgccatcttggatttggcaggttttggctggcttctttgttgcatctttgtgtctttgggtctttgtgacctgtatgttgtgacctgtctcatcctgtgacttagaaagcctcaaccccctgggaatgcagtccagcaggttgcagcctcagtttacccagccccggttcaagatggagtcactctggtttgaaggcctctgattcacctggagacacattccggctgtaccaggcctccaccaggaaagctcccatgataaccacaattacggcagccagacccagtcgtacgaagttacccagggagtagttgctcgatgtggtacctgggggaactgaaagagagaaggggctcagcactgaccctcagagggtatccctccttctcaaatggccccaccaaatctgactatcatcacccacttaatgttttcggttttttggtttttttttttgagacggagttttactcttgttgaccaggctggagtgcagtggtgtaatctcagctcaccacaacctctgcctcccaggttcaagcctccctgcctcagcctcccaagtagctgggattacaggcatgtgccaccatgcccggctaattttatatttttagtagagacggggtttcgccatgttggccaggctggtcttgaactcccgacctcaggtgacccgcccacctcagcctcccaaagtgctgggattacaggtgtgagccaccgcgcccggccacccacttaatgttttctagccagtagtccactgtactttaaagttttaattgaactttttttttttcttgagatcaagttttgctcttgttgcccagactggagtgtaatggcacaatctcagctcactacaacctctgcctcccgggttcaagtgattctcctgtctcagcctcccaagcagctgagattatgagcatgtgccaccacacccggctaattttgtatttttagtagagacggggtttctccatgttggtcaggctggtctcgaactcctgacctcaggtgatccacccgccttggcctcccaaagtgttgggattataggcataaaccaccatgcctggccataattgagctctttaaagttttaatccctgaaaacaaaagatggaatctttgttgttgtttttgagacgacgtctcactctgttgctcaggctggagtgcagcgacgcagtctcggttcactgcaacctccacctcctgggttcaagcgattctcctgcctcagcctcccgaatagctaggattacaggcacctaccaccacacccggctaatttttgtatttttaatagagatgggttttcgccatgttggccaaactggtttcgaactcctggcctcaagtgattcgcctgcctcggcctcccaaggtgctgggattacaggcctgagccaccgcgcccggccaagatatgcaatcctaatgagttgtaatgggagttcctttatcttccttccttgatattcactccaccttagctctcttccttcgtttatttgctctttatcccatttccaccttcccacattgccttttctcctcccgcatccttatgttaaggaatagtcttggggcagcacatgagacggaaggagctctacagagccccgaattccgtggctggatcagcatcctcgcagcacacactgctgtgcagcagtgcacctgagaaagtttgagttgaggccgggcacagtagctcacgcctgtaatcccagcactgtgggaggctaaagtgggaggattgcttgaggccaggagttcgagagcagcctgggcaacatggcgaaaccccatgtctactaaaaatacaaaaaaattagccgggtgtggtggcgggtgcctgtaatcccagctactcaggaggctgaggcaggagaattacttgacctgggcctggggttggggggtggaggctgcagtgagctcagattgtgccactacactccagcttgggcgacagagtgagactccatctcaaagaaaacaaacaaacaaacaaaaccctagcctccagattttcagggaggctgatttgagtaataataaaactctgattggccaggtgcagtggctcatgcctgtaatcccagcactttgggaggcccaagcgggcagatcacgaggtcaggagttcgagaccagcctggccaatatggtaaaaccccatctctactaaaaatacaaaaattagccaggcagggtggcacacatatagtcccagctactcgggaggctgaggcagaagaatcgtttgaacctgggaggcagaggtttcattgagccgagatcgcgccactgcactccagcctgggcaacagagcaagactccgtctcaaacaaacaaacaaacaaaaaaactctggtctcccacttacctggctcaatgtgtattaaactcttttttgcaattcctctgtcttgatgaatgggcttcatccaggcacccggcaagagctgtaatgtaactcattacagcagttacaacagatgaaaaataatttacagagctgaggaagcagagtgctagcacccagtaaggcaggaaacaagatactttcagaagaattctagcagtcaataaaagacatgggtagacttcgcatccacggcatagaagcaggaggctgtgcaaacaccatgttctgaggatgagataattttttttttaaatttgaaactgggtctcactatgttgcccaggctggtctcaaactcctgggctcaagcaattctccagcctcagcctcccaaagtgctgggattacaggcctgagccaccacacatgactgagaaagaattattgagagtgaaatcactaacaccaagaaaaaacaaaacacgccatgcacagtggttcacacctgcaatcccagccctttgggaggccgaggtgagcggatcacctgaggccaggggttcaagaccagcctggtcaacatggtcagaaccccatctctactaaaaatacaaaaattagccaggcgtggtggcgggcacatgtaatcccagctactcaagtggctgaggcaggagaattgcttaaactcgggaggcagaggttgcagtgagctgagatcgcaccactgcactccaccctgggcaacagagcgagactctgtctcaaaaacaaaatgaaacaaaacaaaacaaaaaaccaaaacgctaagagatgcaaagactggtagaaggaatctggtgctggtagattcataattttcaaaaacagcctagaaattttccaaggatgtagtataacaaaaaggcaaaggagggccgggcacggtggctcacacctgtaatcccagcactttgggaggccgaggcaggcagatcacctgaggtcaggagttcaagaccagcctggtcaacacggtgaaaccttcatcgctactaaaaatagaaaaattagccggatgggtggtgcaggcctgtaatcctagctacctgggaggctgaggcaggagaatcacttgaacctggaaggtggaggttgcagtgagcgaagatcgcgccattgcactccatcctggcaacagagtgagactccatttcaaaaaaaaaaaaaaaaaaaaaaaaggcaaaggagtggaaattgtgaaagggaggtttttttgttgttttgttgtttttgtttttgttttttgttttttgtttttgagacagagtctcactctattgcccaggctggagtgcagtggcaagatcttggctcactgcaacctccgcctcccatgttcaagcaattctcctgcctcagcctcccaagtagctgggtctacaggtgcatgccatcatacctggctaattttttatttttagtagagacggggtttcactatgttggccaggctggtctcaaatccttgacctcagatgatccatccacctcggcctcccaaagtgctgggatgacaggcatgagccaccacgccaggccagaaagggaagattttgttaagagcgatgatattgtaagtaatgaagaaatgagattcacagaagaacaaaacaatctctgattaaaaacaacacacacagttcctcaaaaccatacacgcccttacctgtcaccaatatctcaagctgatcactgggttctgaggcccagaagggagactttgtctggtagtacatgcagctgtagttcccagcatcgccggctgtcacgtccaccagagagaagtctatctccttccccgctggactctgcagctggatgggtgatggcgtccctgccttcagtagagcgaacatgataggcacaaacaattggtctcgcttctggcactgcagagtcacccttccacctgcggtcactgtacccctttggtaggttcggaggaaaggtttagataaatgtcctgtaagagaagtcaggttctgaggtcctggggagaagtctggaatcccccactcacccctgttctcctggccggaggctctcgtggagtgtgggaaatgagagattcctgatctcttctaccttcctccacttcctactccgaccccaggacagagattctccctcctacaagacctgtgtaaggcctggcatggtggctcacacctgtaatcccagcactttgggaggccaaggcgggtggatcacctgaggtcaggagttcgagaccagcctgcccaacatggcgaaaccctgtctctactaaaaatacaaaaattagccgggcatggtggcaggcacctgtaatcccagctgctcaggaggctggagcaggagaatcacttgagcccaggaggcggaagttgcagtgagccgagatggcaccactgcactctggcctgggcgacaaagtataaaaccaacatatgcaatttcgttcctgtctctctccctctcccaccacccccaactactctgaaggtgggaccccttttctccctctgttcctccacttcctccctcatcccctgtcccccgtatgtcattggcaggcaccctgtctgtacctgtcaccaacagtagaaggacgtcactgtgctgtgaaaggatgtggggggatgcttttctgtagtattcacaggtgtactctccagcatttctgacttttagattattgaggtgaaattcggccgcgccctctgtagaatcaaggggcttcggggactccagaataattcctcccttcctgagaacaaagctcacacctctggcaggagtccaacatcgcagcgtcacattgctgttggcagggaccaccgagctgggccaggcactgagggacggcttgggcagtgaccctggaaggaagcagagcctgatgctggacccgatgccctcccctgctctcaggaagccctttttaaaatttattattattattattattttgagatggagtctccctctgttgcccaggctagagtgcagtggtgcaatctcagttcactgcaacctccgtctcctgggttaaagcaattctcctgcctcagcctcccaagtaggtgggattacaggcacgcaccaccacacccagctaattttgtattttagtagagacaaggtttcaccatgttggccaggctggtctcgaactcctgacctcaggtgatccacccaccttggcctcccaaagtgctgggattacaggcgtgaacccctgagcccaatcaggaatcccattttaagaagggaagcgggctgggtgcggtggctcacgcctgtaatcccagcaccttgggaggccaaggcaggcagatcacgaggtcatgagatcgagaccatcctggccaacatggtgaaactccgtctctactaaaaatacaaaaattagctgggcgtggtggcaagcacccgtagtcccagctacttgggaggctgagacaggagaatcacttgagcccaggaggcggaggttgctgtaagccgagattgcaccaccgcactccagcctggcgaaagagtgagactccgtcaaaaaaaaaagagaaaaagagggggaaggggaagagaacagcaggggatttgggatgacaggccaaggagggtgtagttgaagaaacactcaccatctccccttgtgtctccttggcccacgcacagtcctgcaagacaatcctccgtgagccagaagcccctacctggagccacgtcaccccctgccctgacccctggagatcgtcccagagtctcctgctgagaacagacccttagaggtcatacgctcaggagttctcattctccccacactggactgtggcttctgctcgacttccagctcctccatcctttcccagagattctccttgaccatcctgtgtggctgtcacctccccctgctccaggcctttcccacaaatccttccattctcatcttctgtttgaaaacagcactcattcttaccatttctttctttctttctttttctttcctttctttctttcttttttctttctttcattcattctttctttcattcattccagagacagagtctcgctctttctttctttttctttctttctttctttctttcattcattctttctttctttcattcattccagagacagagttgcgctctgtcgcccaggctggagtagagtgacgcaatctcggctcactgcaacctccgcctcccgggttcaagtgattctcctgcctcagcctcccaaatagctgggatcacaggcatgcgccaggacgcccggctgagttttgtattattagtagagacagggtttcaccatattggccaggctggtctcgaactcctgacctcaggtgatccacccacctcggcctcccaaagtgccgggattacaggcatgagctttgtgcccagcttctttttattttttaatttttcattttattattgtgttttgagacagggtctctctctgttgcccaggttggagtgcagtggctccatcatggctcactgtagcctcccaggctcaagtgatcctcccacctcagcctcccgagtagctgggatcacaggtgtgcaccaccacacccggctaattttttagtctttcccagagacagagtctccctatgttgcccaggctcatgatctcttttaatcccttcatgactccaaacaggacaaaatttattgtttggtgtcctgtaacaagcctcaaaacatccaaatggtcattccagaaaggggaaagcatacgttcctccctgtttcacacatggctgcatttgctcttcctcctttttaattttttttgatagagacagggctgggctggttaagaactcttgaccatgccgggcgcggtggctcccgcctgtaatcccagcactttgggaggccgaggcaggtggatcacgaggtcaggagttgaagaccagcctggccaacatggtgaaaccccgtctctactaaaaatacaaaaattagccaggtgtggtgatgggcgcctgtgatcccagctactcaggaggctgaggcagagaatcgcttgaacccaggaggcagagtttgcaatgagctgagatcgcaccactgcactccagcctggccacagcgcgagactcagtttcaggaaagaaaaaaaaaagagaaagaaaagaaaaaacataatatcaagcctgtttatgaacattatcataataatgagattgatctaactcaaagaaagttagttaggcctgtgtctctgagagatttcctctttttcccctgtgtgaacagttttaggtctcagcaggaaaaaggagaagttaccaggcgtttgtgctactattacatccatgagccaatccataaactgacacttcaagttttgcaaaaggaaattgtgaacacccaaaatgttcaaacaacgtaagtgtccatccatggaagaatggataaacacagtgtgctctatatattcaatgggatttttcttctttttcttcgttttttttttttttttttttgagacatagtttcattcttgttgcccaggctggagtgcaatggcgcgatctcggctcactgcaacctccgcctcgcgggttcaagtgattctcctgcctcagcctcccaagtagctgggattacagctcactgcaacctccgccttgcaggttcaagtgattctcctgcctcagcctcccaagtagctgggattacagctcactgcaacctccgccttgtgggttcaagtgattctcctgcctcagcctcccaagtagctgggattacaggcatgcaccaccatgcccagctaattttgtattttttagtagagacagggtttcaccatgttggtcaggctggtcttgaactccccacctcaggtgatccgcccatcttagcctccaaaatgcttttttctttttcttttctttctttctttttttttttttttttttttttttgaggcagggtctcgctctgctgcccaggctggagtgcaatgatgtgatcctagttcattccagcatcaactccctgggctcaggtgatcctcccacctctgcctcccgagtagctgggactacagctgcacaccaccatgcccagctcatttttgttgttgttgttgtttttaatatttatttatttattttgagatggagtttcgctcttgttgcccagactggagtgcaatggcatgatctcggctcactgcaacctctgactcctgggttcaagcgattctcttgcctcagcctcccaagtagctgggattacaggcgcccgccaccacgcatggctaatttttatatttttagtagaaatggggtttcaccctattggccaggctgttctcgaactccttacgtcaggtcattgcaaaaaaagtgctgggattacaggcgtgagccaccatgcccagcctcatttttgtattttttgtagagacagggtttcaccatgttgcccaggctagtctcgaactcctgggctcaagcgatctgcctgcctcagactctcaaagtgctgggattacaggtgtgagacactgtgctcggcctacagtgggattttagccataaaaaggaaaggaaatctgacatatcctacaatatagatgtagctcgaggatattatgctgagtaaactaagtcaggcaaaaaagaacaagtgttatgattccactcatacatcctagaataagcaaattcatagagataaaaattagaatgggctggacacggtggctcacgcctgtaatcccagcactttgggaggccgagacaggcagatcacaaagtcaggagatcgagaccagcctggtcaacatggtgaaaccttgtctctactaaaaaaaaaaaaaaaaaaaaacttagccaggcatggtggtgagcgccagtgatcccagctactcgggagggagaggcaggagaatcgcttgaacccaggaggcggaggttgcagtgagctgagattaggccactgtactccagcctgggtgacgaagcaagactccatctccgaaaaaaaaaaaaaaaaaagaaattagaatggaggttaccaggggctgggaggaccgcggcaaatacagagttattggttagagggtgtagcgttcatattgggaattgtgattgttaatttgatttatcagctagaccaggccacaggatgctgggatatctggttaaacattatttctgggcgtgtctgtgagggtgtttttagaaagatcagcatttgaatctaatgctgagtcgggcaggttggccttcctaatggaggtgggtattctgctgagggccaggatgggagaaaaaggtggcagagccaccacagtggctcacgcctgtaatcccagcactttgggaggccaaggcagaagggctgcttgaggccaggagtttgagaccagcctgagtaacatagtgagatcccgtctctacaaaaaatttaaaaattacacggggcactgtggctcacgcctgtaatcccagcactttgggaggctgaggctgaggcgggcagatcacctgaggtgatcacctgagggagctcaagaccagcctggccaacatgatgaaaccccgtctctactaaaaagtacaaaaaatcagccgggtgtgtggtgggcacctgtaatctcagctacccaggaggctgaggcaggagaattgcttgagcccaggaggtggaggctgcagtgagctgtggtcataccactgcactccagcctgggtacagagtgagactttgtctcaaaaaaaggaaaaggagggaaggaaggaaggaaggaaggaaggaagggaaagagagagaggaaggaaggaatgaaggagaaagagaaagaaaggaaggaaggaaggaaggaaggaaggaaggaaggaaggaaggaagaaagcaagcaagcaagcaagcaagcaagcaagcaagcaagcaagcaagcaagcaggcaagcaagcgggggctcacgcctgtaatcccagcactttgggaggccgaggcgggcagatcaagaagtcaggagatggagaccatcctggctaacacagtgaaacctacgaaaaaagccgggcatggtggcgggcgcctgtagtcccagctactcgggaggctgaggcaggagaatggcgtgaacccgggaggcggagcttgcagtgagcagagatcgcaccactgcactccagcctgggcgacagagcgagactccatctcaaaaaaaaaaaaaagaaagagagagagaggaaggaagggaggaaggaaggaaggaaggaaggaaggaaggaaggaaggaaggaagggaaggagaaaaagaaagaaaggaaggaaggaaggaagaaagaaagaggttttagtgtagatagtggtgatggttacacagcggcctcaatttactttatagttatctatttgacactaaatttttatttatggtattaaggtttctgggccaggcacagtggctcacatctgtaatcccagcactttgagagactgaggtgggcagatcacctgaggtcgggagttcgagaccagcctggccaacatggtgaaacaccgtctctactaaaaatacaaaaattaaccaggcatggtggcgcacccctgtaatccagttactcaggaggctgaagcaggagaatcgcttgaacccgggaggcagaggttgtggtgagccgagatcacgccattgcactacagcctgggcaacaagagcaaaaccctgtctcaaaaaaataaaataaaataaaataaaataaggtttctattctgaatacttttacttacacacaaaaagtcagagttgatcctgagaaaaggggtaagccaatgaagccaggtggtggaggcattcagcaaaactcacgaagttgaaactacaggagttgaagtttgcagagcactcgtttccagggaatgtctgcagtgcactcagcaggacgtctcactcctcccgtgtgctcagtaagccaaagttgatgttattatttccatccccagcccaactatcccaccagttccatgattttctgcagtcccagtggatagccctgtgagacttactgaaacagaggagggaaagcagcttagggatcatgatggctccttagccctcccagagtccgtcttgggttctgcagtccacagatgggagaagagctggagtcgtcgctgcctctctcccaccccagagtgtgggcagtaacagcctttcctagcctttcagtttcccctcccatatccacattcaggaaacatgttgatgttgctgattgcaacatgctccttacacacaccagtgttcgagcacttgactcacaggaaatgctcctctgtctcaggcagatttcaggcatcaaacaggtaaccccgaaaatgcttcagacttggccctgaagggttcgtattgaagagatgaaagcacttcactcttttttttttttttgagatggtgtctggttctgttacctgggctggagtccagtggcacgatctcaggtcattgcaacttcagcctcctgggttcaagcaattctccggcctcagcctcccaagtagctgggattataggcgcatgccaccatgcccggctaatgtttgtatttttagttaagatgaggtttcacaagttagctgggctagtcttgaactcctcgcctcaagtgatccacctgcctcggcctcccaaactgctgggattacaggcatgagccactgtgccaggccttcatcaccattttttttttcttttgagacagagttccactctttcgcccaggctggagtgaagtggcaaaatctcatctcattgcaacctccaacccccaggttcaagcggttctcctgcctcagcctcccaagtagctgggattacaggagcccttcaacacgcccagttaatttttgtattttttagtagagatgaggtttcaccatgttggccaggctggtctcaaactcctgatctcaagtgatccacccacctcagcctcccaaagtgctgggattacaggcatgagccactgtgcccagccagtcatgagctcattttttaagttcagaatatttcagtacatatctatctttatcaaataagaaccattttaaaaataatataagcaccacagcactgtcacatcaagaaagttaagagtacctccttgataccagctaatacccattcagtactcaaatttccctgattgtctcaaaaatgtcatttctatcaggtttttaaagaataaatcaggatccaataaaagtctacagattgcatttgataattatgttaatttagcctggcgcagtggctcatgcctgtaatcccaacactttgggagaccggggcaggtagataacctgaggtcaggagttcgagaccagcctggccaaccatggtgaaacctcatctctactaaaaatacaaaaattagctgggcgtggtggtgcacgcctgtaatcccagctactcaggaggctgaggcaggagaactgcttgaacctgggaggcaaaggttgcagtgagctgagatcgcaccattgcactccagcctgggcaacagagtgagactcagtctcaaaaaaaaaaaaaaatgttaatttgaatcagacaaaattttttatttttttgttaaaataagaaatcaagcaagttagtttttaaccatgttttttttcatcttgcatttggaagaagagcaaaatgccccgaagtctcgtttttgttttcggattttttgtcttgatagcacctactcttcttactgttttggaacatagaaaagtcaacaaggcaacaaattataaggagtaaaaccaactataattacaggtgtttctttgaaagttattttcacaagatgtggcaatgatttttaaaggcttgggactcttacaagacccttttgttcaaataacagttttgtgtatgaatttatttcaacagagaacaatttagtaatgtttgtgaatattcatttagttctccatattgtaccagaaaacaagactgatattcttgtgaatcttctcaattcaactctttatcaaatcagattccttaaattagtgttgtgactcagaaaaaatctttctccttatgcagtatcagggaaaagaggacatctcctatatttcttcttaacatctctgttgctaacaaggaatatgcatattttaaaactaggctctggaattttatcagtcaacaggaaaggcctggtaaagttccattccacttggaaatgaagaaaggagaccctgattcaaaaaacgaaaaaagaaagaataaagaatagcttagggccaggcaaggtggatcacacctgtaatcctaagattttgggaggtgaggtaggtggaaggcttgatcccaggagttcaacaccagcctgggcaacatggcctaatcccatctctacaaaaaatacaaaaattagccaggcttggtggtatatacctgtaatcccagcttctcaggaggctgaggtgggagaatcacttgaacctgggagggggaggtggcagtgagctgagatcgcaccattgtaccccagcctgggcaacaagagtgaaactccatctcaaaaaataataataaaataaataaataaataatcattcactttgttaggtgtttatcacacctaaccttaagaatatgttaccaaaataaaaagtcttatagatgaaatcatattatatctgaggtttactttaaaatactccaggagaaaatttaaaatagacttgggggaggggacttatctgtagttatctgcacataatctacatgattatctcaaagccatccttttgctgttgagaattctgatttttagctgggcccattggcacccaggtaaaaaactacattcttcagtgtcacttacaggtagatgtagccgtaagtcttcatctaggacaatgataaataagcataaatattgtagacagcttccaaaaggttctttaatgaagtacactttccttccttcacttaactgcctaaaatgtggatgtgatgactggtattctagcgtcatcttgaaccatgaagatgagatgaggttcaagatggtggagggtgagccagaagtaacttaggtccataatgctttttggagtcactgtgccagccttggactgctcccttcagatttattctacataagggagaaatcaattggtattagttttaagtcatcattatttagttctcttttgggtttaggttatcaattactgtgttaacaaaccaccccaaaactgagtaacttagagtaacaatcttgtttttttttttttttaatcattcctgatctggtgagatgactgggctcagttgagcggttcttcggttcaatgtgatgtcttcctgggcttcagtcatcagggtggctcaactgagctggaatctccaagatggcacttgcaaatggctggctgttgatgctggatgttggttgaaagctcggctaggactgttgaatgatgtacctgcacatggcctctccatttgattcagacttcttggaggatagcatctgggtttcaagaggggatgtcacaagagagctttctaaaatagagaaggcggctgggcatggtggctcacgtctgtaatcccagcactttgggaggccgaggtgggtggatcacctgaggtcaggagttcaacatcagcctggccaacatggtaaaaccccgtctctactaaaaacaaaattaaaaaaaattagccgggtgtgtttgtgcacacctgtaatcccagctactcaggaggccgaggcaggagaattgcttgaacctgggaggcggaagttgcagtgagccgagatcacaccactgcactccagcctgggcaacagaatgagactctgtctcaaataaataaataaataaataaaataaagaaggcaaaagttgtttgtccctttaaagactaagcctggaactgacacagtttctcttcttctacagtcttaaggaaaggccagattcaaggggagggaaaataaactctacctctctatagggacagtgacaaagaattggaggccatctttagtctgtcatgtgttatggtcaatggaaatagatatatatatatttactgagtgcctgagtcccaccgagagattttaattatttttttatttttgtttttttaagatggaattttgctcttgttgcccaggctgaagtgcaatggcatgatctcagctcactgcaacctctgcctcccgggttcaagcgattctcctgcctcagcctcccaagtagctcggattacaggcaagtgccaccacacccagttaattttgtattttttagtagagatgggatttctccatgttggtcaggctggtcttgaactcttgacctcaggtgatctgcccaccttggcctcccaaagtgctgggattacaggtgtgagccaccgtgcccagtcgagattttaatttttataatgggtataggatgaggcctgggtgtctcattctgtgttttaaatgttcctgggaaattctaatgtgcagtcaagtttgagaaccactgggttggaacacataacctccttcccatctcagaccctgaaacatcctgaaaactcctgtatctggagtttttcccccatttttgcttggctaactttgactcttccctcagaaaccagcttcagaatcttttctttagcaaagacttccctgcaagttctttaacagcacttatctcagctgtgacaaaatcatcaatggtgtaattgtgtctttttaatgtcttttcccctattcttcataatcgtcaaagtaaaggatagctcttctctcagtcagaactattaatagatgctgtaatggaaatgaaacaagactctcagactcttgttaaagtaagaagtctagcagagtctcaggctttaattttttttttccgatcataaatgtgggagaaagatcatttaacctgctgctaaggtttgaatatttgttcccttgaaaactcatgttgaaccagcctgggcaacatagggagaccctgtctctacaaataatttaaaaattagccaggtgaggtggcacatgcctgtgatcccagctactcaggaggctgaagtgggaggatcacctgagcccagaaagctgaggatgcagtgaaccgtgattgcaccactgcactccagcctgtgcaacacagtgagaccctgtctcaaaaaataaataggtaaataagctgagtgtggtggctcacacctgtaatctcagcactttaggaagccaaggtgggcagatcacatgaggtcaggagtttgagactagctggccaacatgatgaaaccctgtctctactaaaaatacaaaaattacccgggcatggtggcacgtgcctgtaataccagctactcaggaggctgaggcaggagaatcacttgaacctgggaggtggaggttataatgagctgagatcatgccactgctgtccagcctgggtgacatagcaagacattgtctcaaaaaatacataaataaataataaataaacttatggtgaaactgaatccctaatgtggccgtattgataggtcgggcatttaagaggtgattgggtcatgaggactcttttctcatgaatgaactaatccattcatggattaatgattaatggattagtgagttaatggattaatgggttaccctgggagtgagactggtggctttatcagaagaggaagagagacttaagtagcacgctcagctcttttgccctgtgatgccctgtgccacctcggaaccctccagagagtccccaacagcaagaaggtcctcaccagatgcagcccctccaccttggactttccaacctccattaactacaggaaataaattccttttctttataagttatctggtttcaagtgttctgttctaagcaacagaatacagactaagacacagacaccaatgcatagcttctgatttaacagaattgtttttacaagcatttattctgcttggaaattcagatgtcaatcataagattgttaccagggcaacaaaatattaagtaagaccaccaaatggcaccaaggtttctccttcaaaataatgattgcaatactggcaataatttctaatgtctttggactcctacaagattattttgtgcaaattacacttcaaagcacagatttatggaaccacagaatggaacactggctgctgtaataaatatccatagatctccatactacataagactataaaacacatttagagcctttttaatattctcagtttattaacttatcaatccacattccgtttttttgtttgtttgttttgttttgtttttttactttaagttctagggtacatgtgcataatgtacaggtttgatacatgtgccatgttggtttgctccacccatcaagttatcatttacattaggtatttctcctaatgctatccctcccccagccccccaccccactctgtttttttttttgtttttttttttttaagacagggtctcactgtgtcacccaggttggagtgcagtggtgtgatctcgactcactgcaacctctgcctctcgggttcaagtgattctcttgccccagccctcccaagtacaaggaattacagggttgtgccaccacgctgggctaatttttgtacttttagtagagacagtgttttgccatgttggccagggctggtctcgaacttctgggcccaagtgatccgcctgcctcgacctcccaaagttctgggattacaggtgtgaaccaccatgcctcgcctaaactacattcttgaattagttttatggcacagaatatctttttctcctctctcaatgccctctctctctctagctccctctcctcccctacagctgcaaagaagagatcttcttaatccatttcttaaacttcttttgatcaattataaagaattttttttttagatggagtctcactctgtcacccaggatggagtacaatggcacaatctcagctcactgcaacctctgcctcccgggttcaagtgattctcctgcctcagcctcccaagtagctgggactacaggcatgtgccactatgcccagctactttttttttttttttttttgtatttttagtagagacggggtttcaccatgttagccaggatggtcttgatctcctgacctcatgatccgcccacctcagccttccaaagtgctgggactacaggcgtgtgccactacacccggctacttttttttttgtgtgtgtgtgtgtttagtagagatggagtttcaccatgttagccaagatggtctcgatctcctgaccttgtgatccgcccgcctcagcctcccaaagtgctgggattacaggtgtaagccactgtgcccggccaattataaatattttttaaggctaaactctggaattttgctagttagccttaaaagcacaaagcaggcctataaagttcaattttactggtagaaagcaagaaatggatgaataggatgttcgctgacaaccatgcaattgaaacctcctttgcaaaaattacgagagtgagcaaaggatggcagtgaaggagatcggatctggccagcccctaccttgcctttggccctcaaactgcctgtagttattcctgggtttaggctaatctgacttgtctctttgggagacatttattttattttcttttatatttccttgagacggagtctcgctctgtagcccgggctggagtgcagtggtgagatctcggttcaccgcaacctctgcatcctagttcaagggattctcctgcctcagcctccagagtagctggaattacaggtgcctgccaccatgcccgactaatttttgtatttttagtagagacggggtttcaccatgttggccaggctggtctgaaactcctgacctcaagtgatccgcccgccttggcctcccaaagtgctgggattagaggaaagaaggaaaggaaggaaaagaaaggaaaagagaggagaggagaggggaggggaggggaagggagagaaaggaaaggaaagggagagaaagggaagagagaaagaaagaagaaaagagagaaagaaagaaagaaagaaaagaaaaagaaagaaagaaaaagaaagaaagaagaaaaaagaaaagagaaaaggaaggagggagggagggaggcaaggaaggaaggaagcaagaaagagagaaagagaaaagaggctccttataaacaacaaaagacacccttctcaccaagggtttttggaaattccagagtgatggggtgagaagggtgtctttggaaccaaagctgaagaccaagtacatatttcttactatatcacggtatcacgggaggtaaaacggaggtgtccttgaagcagctcctccccagcccccaatcctcttgtgtgcccggaggatcagaagaggtcccgccgagactcagcttagctgtggttcaagcctctgattgcgtggataagtaccaggtttccagagtgccagggcggggctgccccttgcggtggcattaactttccatggctatttaaaatcagcagaggacacacgatcttcagatgggtcctgttttacttccatattttctcctagagagaagaaaaatcattaaacttttttttgtttgttttttgtttttttgttttattcgttgtttttcttttttttgggacggagtctcgctctgtggcccaggctggagtgcaatggcgtgtatcagctcactgcaacctctgcctccagggttcaagtgattctcctgcctcagcctcccgagtagctgggattacagctttgtatttttagtagagtcggggtttcactatattggccagggtggtctccaactcctgacctcaggtgatctgcctgccttggcctcccaaagtgctgggattacaggcgtgaaccaccgcacctggcctactgtattttttttttttttgaatagagaagggagtctcaaactcttggcctcaagccatcctcctgcctcagcttcccaaaatgctgggattacgagtgagccactgcacctatcccaccccctcccaccctcatttttagaagggcacaggctagagaccatatttccatcagtcacttttgcggctagacctggccatgagactaagttctagccaatgggatgcgataggaagatatatgctcaaattctaggtcctgctcttaaaaaataattgtgtgggccgggcgcagtggctcacgcctgtaattccagtactttgggaggctgaggcaggcggatcacgaggtcaggaaatcgagaccatcctggataacacggtgaaaccccgtctctactaaaaatacaaaaaaaattagccgggtgtggtggtggacgcctgtagtcccagctactcgggaggctgaggcaggagaatggcgtgaacccgggaggcggagcttgcagtgagccgagatcgcgccactgcactccagcctgggcgacagagcaagactccaactcggaaaaaaaaaataataataattgtgtgagcccttttctctctgtcctctccactttcttggggctcagaaccagaaattaaagctacatgttgataaaagcaaaaccatcccaccttaacaagtaaatcgttgagattgcccagtgatttactgttaagtgagagagaggtacatttatatctagtttttttccggtggtgaaggagattctttttttctctctctctctcttttttatgagatggagcttggctcttgttgcccaggctggagtgcaatggcacgacctcggctcagtgaaacctccgcctcccgggttcaagtgattctcctgcctcagcctcccgagtagctgggattacaggcatgcaccaccacaccaggctaattttttgtatttagtagagacagggtttcaccatgttaatcaggctgctctcgaactcctgacctcaggtgatccacctgccttggcctcccaaagtgctaggattacaggtgtgcgccactgcacctggccgggagattcttttttacaacagcttaaagtgctctgtaaccaatacactatgcagtgatttggttaatactttgtgagttccatgagtgcagggtttacgtctgctattgctccccactggaccgccggactctagcacaatgccatgcacggtagacattgaatacatgagtgatacgaggatgaatgagactaggggaaatcagtggaagccctaggcctggcgcagtgactcactcctggaatcccagcactttgggaggccaaggaaggaggatggcttgaggccaggcattcaagaccagcctggacaacatggtgagaccccatagctataaaaagtaaacaattagccgggcgcggtggctcacgcctgtaattccagcactttgggaggccgaggcgggtggatcacgaggtcaatagatcgagaccatcctggccaacatggtgaaaccccatctctactaaaaatacaaaagttagctgggcgtggtggtggcacacgcctgtaatcccagctactcgggaggccgaggcaggagaatcgcttgaacccaggaggcggaggttgcagtgagccgagatcgcgtcattgcactacagcctggcaacagagcgagactccatctcaaaaaaaaataataataataatagtaataataaattggccaggcgtggtgatggcagtgttgtcattgctttaagaggcaggaacagggggaaaagacccagcagtctaaccacacagacaagtcccaagttaagcacttctgtgtgacttgggggctgttgataaagatcagaaataacctatgtggatcacccagcaaaatgaccagtatgaaaagatgttcagtggtagaaaatgaaataagcattgtgactacaactcactcaataagcattcattgaacactggtcactggtaaactgctatgaagaaatctcagctgggtgcagtggctcacgcttgtaatcccagcactttaaagggagaccaaggtgggcagatggatcactttaggtcaagcgttcgagaacagcctggccaacatggtgaaaccccatctctactaaaaacacaaaattagccgggcatggtggcaggtgcctgtaatcccagctacttgggaggctgaggcaggagaatcgtttgaacccgggaggtggagattgtagtgagctgagatcacaacactgcactccaacctgggaaacagagcaagactccatctcaaaaagaaaaaaaatctcaagcttattggatagataaatgcacaggtagatagatggatattgaatgaataaatagttcagtggattaaaaactggttaatgaagaaatggatgggtaaatggatggaaatatgaatgaatgcatgatggataaggacaaatgaaatagacaaatgtacaaatgaaagcaaaggaaaaagagatgctcaatagaaatgaataaggatgagaatcaatgctagacatgaatgagtgaatggtgaatgaaggagtgattgaatggatgaatacatggagttaagttgaagtacaaactcggccaagacttctttttctctgctttgggtggaaatacattttaaaaaaaagagggccgggcacggtggctcatgcctgtaatcccagcactttgggaggctgaggcgggcggatcacctgagtttgggagttcgaggccagcctgacctacacagagaaaccctgtttctactcaaaatacaaaattagccaggtgtggtggctcacacctgtaatcccagctactcgggaggctgaggcaggagaatcacttgaacctgggaggcggaggttgtggtgagccgagatggcgccattgcactccagcctgggcaacaagagcgaaagtccacctcaaaaaaaataaaataaaataaaataaaataaaaaaagagggaaaaaggaaaaaaaaagactccctgatgtgccactgacttcctgtacatgtttaggtaaacttaatatcacctctctttccaccattttcccatttataaagtgggaagactggatttgatgacatcacagcctcatccaggtctggtgccttccttataacctgcgtctcttctttattcttttttttttttttttttttttgagacggagttttgctctgtcacccaggctggagtgtgcagtgatgcaatctcggctcactacaacctccgcctcctgggttcaagcaattctcctgcctcagcctcccgagtagctgggattacaggcgcccgccaccatgcccggctaatttttgtatttttagtagagacggggttttaccatgttgtccaggctggtctcgaacttctgacttcgtgatccacctgcctcagcctcccaaagtgctaggatcacaggtgtgagccagcacccccggcttattccttttttaaaattgttattatttcccacagccacatatgccggggaggttgtcccacatatgttctaccaaggcccctctggcactgagatcaaaccccggaagacccgctcagtctctcctcccgtcttttcaacacgttagcgcccccaggtggctaattagacttcaaaattcagttcttgaggcgggcggatcacttgaggtcaggagttcaagaccagtctggtcaacatggtgaaaccccgtctctactaaaaatacaaacattagccggacatggtggtacgcacctgtaatcccagctattcgggaggccgaggcaggtggatcacttgaggtcaggagttcgagaccaccctggccaatttggcaaaactccatctctactaaaaatacaaaaattagctgggcgtgatggcgcacacctgtaatcccagctactcaggagactgaggcacgagaatcacttgaacccgggaggcggatgttgcagtgaaccgagatcacgccactgcactccagcctgggtggagtgagatcttctctcaaaaaaaagaaagaaagaaagaaagaaaaagtcgtgcttgattatgcttgatggcaaaaaggtgagaccttcctttcggcactgagtctggtagaaatcggtgttacagggtagctaacatttattgaacacttactacgggccagttactgctttaaatgttttatgtgtattacccactgactcctacaacaatcctatgaagtgggttttatcagtgcatccattttaccgtcaaggcaagagagagttggggaagggcgctttctgaatgctgctaccgtgtccagagttggttccttcctgtgggtttgtggtctcgctgactttaagaatggagccagggaccttcgtggtgagtgttacagcgcttaaagatggcacggacctaaagagttagcagcagcaagatttattgtgtagagcaagagaacaaagctcccacaacgtggaagcagactctggtggggtgccgcgctcgccagcttttattcccttattgtccccgcccgtgtcctgctgattggtccattttacagagcgctgattggtccatcttacagagtgctgattggtccattttacaatcctcttgtaagacagaaaagttctccaggtccccattcaacccaggaagtccagctggcttcacgtctcactactacctttctgtagctgctactactacagtgagtagacggcagtgctgggattcgaaccctctgtcttctggcttggaagtcttaaccactaatcgcgtcttcctttcagctactccttgggaaaggcctggaaagaagctacagcacagggcacagcggggtctaaggaccgttccgcggagctcagccagcaggactgtggggctgcaggaaaggacagtccagcccagggtcccagcttctccgccactcaggttggaagtctcgggctgcagtgctcctggggctcaggggcggataccagcaggagcgcggttctgactgcgccagtcaaaagtgaccagcgcgcccagggagatgaggaccagcccggccagccccaggcggactaggttcccccgggtgtagtcggaggagccagagtctgcgggcggagccgggagagaggggccatcagctcccggaccccaaagtctgggccctgaactccaggtttccagcccctggggtggacttagggacctgactctacagtctcaaagttgagggggagtcgatggaggcttcaactcctgggtccaggaagaaggggctggggcctggactgctggatcaggaaggaggggctgggggcctggagtcctgggtccaggaaggaggggctgggggcctggagtcctgggtctgagggaggaggtactggggcccgggaatcctgggtctgagggaggaggagctggaggactagactcctggatctgagggaggaggggctgggtcccaggaatcctgggtctgagggaggaggggctgcaggactagacccctgggtctgaaggaggagaggctgggggcctgggctcctgggtctgagggcggaggtcctggggcctgcattcctggggcggaggaggcgggccgggcctcagggccctcaccttcccagctgatgaccagcacctcgctgcgctgcgacagcacgtagggcgcggagggcgtgtgatagtagcagctgtaggtgccgggggcgcgggcgcccagcagcgtgaagtcggcccagggctgcgcggagtggcggtactgcagcggggccgccacgccctcgcggtacagcacgaagctcatgttccgcaggcggcccgcgcagcgcaggctcacgttggcgccaggacccaccaccggcccgggcagcgccaccagcgacggccgcggcagctcctctgcagagacggggtgagagtccggggccgcgtgagcgtcttccgctcgctcgctcgctctgtttctccttctcctctgtctctcgctttctctgtgcctctctctctctttctgcctctctttctctctgcctgtctctctctctgtctgcctctctctctgcctccctctctctctgcctccctctctctgcctccctctctctctgcctccctctctctctgcctccctctctctctgcctccctctctctctgcctccctctctctctgcctccctctctctctgcctgcctctctctctgcctgcctctctctctgcctccctctctctgcctccctctctctctgcctccctctctctctgcctccctctctctctgcctccctctctctctgcctccctctctctctgcctgcctctctctctgcctccctctctctctgcctccctctctctctgcctccctctctctctgcctccctttctccttctgcctctttctctctctctccccccgcactgtacctctctctctctctgctcccctgtctctctctctccccctagtgtctctgtatctgtcttttcttgtgtctgtgaatctgtttgcccgcctcgctctgtctctctttccctatatctctctgtccctcccccaactcccttgttccacccacttctcctccccgaccccaggacctcacctgtcaccagcagctccaggacatcgctgggctgggaccagacacccggcccccagtctggccttcggtagcagcagcggtaacttcccccttgggctggagtcacctcctccagaaagaattctgccagctcggaggacacatcccggaagagaaggggagcgatctctccaggcttgaaaagtccaaatctccaagcgggttggggtgcccggcatctcaaggtcacgttgaccccaggggtcacaactgtagccggctgagctcccagccatggcttagggtggtatgaagctggggggactgaataaacggggctgcctgggtcctcgggcctcctgggagccccagaagatgaaagggaagttggggaaggaggaaaatcaccttggacaattactgcccctttcttagcctcagtttcctgtttgtaaaatcagggagagactggactacaatcaagccttgttaaaaccaggtgcaaatcagaggggcaggacagaaacttctgagctttactccacagtttgtaaacacagtttcaaaaggtcaggtcccagaactctgtaattttattattattattatttttaagtaatgagatgggagggggcggtctccctatgttgagcaggttggtcttaaactactggcctcaagcaatcctcccacctcggcctcccaaagtgctaagtttacaagcttgtgccaccacacccagacttttttttttttttttttttttttttttgaggcagggtcttgctctgttgctcaggcaggagtgcagtggcatgttctcaactcactgcagcctcaatctcttgggctcaaacagtcctccacctcagcctcctgagtacctgggaccacaggcacatgccactacaccaggctaatttttttttttttaatttttagtagagacgagcattcgctatattgcccaggctactcttgaactcttgggctcaagcaatcctcccacctcggcctcccaaagtgctgggattacaggtgtgagccaccacgcccagccagaactctaattttaaatagctttccagaatatttgcaatatagtatttcaagagttgccaaaacttgctatttggaaaagaaaaatgttggatccctacctcataccatttcccaaaacaacttccagattaattaaagaccctgtgtttctttttttttaaactataaaagtattcaaaaaactataggaaaatatatttgtcttggggtaaggaaggcttcttaaaatataaaataaaaagttgtatggaagattaattaatttgaccacttcaaatttcttaagttgtgtatgctaaaagacaaaactagaggacaaatgatagtactggcagatatcacttattcacaaatcacacaaattaagagtacaggaaggctgttgggtccggtggctcacagctgtaatcccagcactttgggaggccaaggtgggtgcatcacctgaggtcaggagttcaagaccagcctgaccaacatggtaaaatcccatctctactaaaaacagaaaaattagccaggcgtggtagtgctagcttgtagttccagctgtttgggatgctgagtaggagaattacttgaaccctagagtcggaggctgcagttagctgagatcatgccactgcactccagcctgggcaacagagtgagaactccatggtggcatgcactttgggaggctgaggctggaggattgtctgagcccaggaattcaaagctgcagtgagctatgatagagccaccgtactccagcccgggtgacacaatgagaccccatctctaaaaatgaataaaaataagggtcgggtgagggggctcatgtttgtaatcccaacactttgggaggctgaggcagagggatcacctgaggtcaggagttccagaccagcctgaccaacatggggaaaccctgtctctactaaaaatacaaaaattatccgggcattgtggtgtgtgcctgtagtcccagctactcaggaggctgaggcaggagaatcccttgaacccaggaggtggttgcagtgagccgagattgcaccactgcactccggcctgggcgacagagagaaactggtctcaaaataaataaataaataaataaaataaataggtagagatagctatagcgacactgaaatatctccaaaagagttttttttgtttgtttgtttgtttttgaagtggagtcttgcactgtcacccaggctggagtgcagtggcgcgatctcagcttactgcaacctctgcctcctgggttcaagcgattctcttgcctcagcctcctgagtagctgggattacaggtgcgtcccaccacacccggctaattttttttttttttttttttttttagtagagacggggtttcaccacattagccaggatgatctcgatctgaccttgtgatccgcccgcctctgcctcccaaagtgctgggattacagacgttggccattgcgcccagcccaagatcctatttcttaagccctgtactgtgccaggctcagggttttgcacatgtgatttgatgagatctcacagcggcccattttacagagaaggaaatggagtcttagcaagctgtgacttgttctaggtcatatggtcacatataaatgaatacgatggtgaaactgaggtcctagcttaggcctctgcctcagaagttcctggtcttcagtactcacctataatggccactaaggggaatgagaaaagaaggaaggaatggagggagggaggaaaataaggatatctgggatgggattgggcaccaaaataaaatctgagtaattggaaaaggggtgtcagcaacaaaaggagagtggatggggtggctactcaccagacggagtgatgtctgtgtgacacagaggccctgtaggaggttgagggactagtttctttttcctttttttttttttgtctgaggcagagtctcactctgtcgcccaggctggagtgtagtggtgtgatctcagctcactgcaacctctgcctcccaggttcaagtgattctcctgcctcagcctccgtagtagctgggactacaagtgcccgccaccacaccaggctaatctttgtatttttagtagagaggggtttcgccatgttggtcaggctggtcttgaactcctgtcctcaggtgatccacccgcctcggcctcccaaagtgctgggcctcggctcccacaggcatgagccgctgcgcccaacagcgagttcttttcaaaaccctttgtggccagccccatctcattggtaacccaggaatctgagttcccagctcctatctcctctgggaaatgagaatcttatccctccctcctcctgtctcagtaggcagaaatttggacatccattgcccacctaccgaagaagtctgaacgcagacccctctggcctgggcaaccaagagttcaggcccttgaactccacctttccagggaacaatgatcgtagagtttctcctctcacgagttcaggaatctgggtccccatttccctcttctctcaggagctaagagccctgttcccagcccccttttcccagggaatcaggagtcctggcttccatccccctcccatataagaatctgggagtcctccctgtctcctgacctcttcctgcctcaagaaccagagatacctgtccccacctccttcctctttcgggaatctgtgttctcttgctttaggacccaggggtctgggccccagccctgttctttatttgaacctagaatcccaaacctgctgcctggtccccctgcagggtgtctgggtctccattgcctctctctctgcccccaaccccagccaggaacccagggagaagaaaggggtgactcacagagggtcagcagctggaggatcagcaccagggccatggtgggcagatacccgctagagctggagccagggcttggtcgcaccctctcccctcccaggaaatgaggcaacatcagaaaaccagacccagatcctcatttacggaagagagtatcgaggtgggggcctgtgggtgactgtgtcatagccctatggcactgtggaaaaattagcagggggttcagtcataacctgtggtgttcatttatttaactctagaaacaaatactagtcaggaggtggaggcaggaggatcgcttgagcccaagagttcaagagcagcctgggcaacagagcgagaccctgtctaaaaaataaataaataaattgtgccactgcactccagcctgggtgatagagtgagaccatgtctttaaatatagatagacagatagaaagatatctgtctgttttaaaaataagaacctattatgtgccagactcttgctgtcattgattgacagatagataaaaatttgcacctattatgtgccaggcccttgctgtgattgaaagatagatagatggatggatggatagatagatagatagatagatagatagatagataaaaattagcacctgttaagtgccaggcccttgctgtgattgattgatggatagataaaaattaacaccaattatgtgccaggcccttgctgtgattaattgatcgattgatagattggttgacagagaaaaattagcacctattatgtgccaggctcttggtgtgatactgtgttagatagatagatagataaaaattagcccctctaggccgggcgcggttgttcacgcctgtaatcccagcactttgggaggccaaggcgggtggatcacctgaggtcgggaagttcgagaccagcctgaccaacatggagaaacccccgtctctcctaaaaaagaaaaattagccggctgtggaggcgcgcgcctgtaatcccagctattcaggaggctgaggcaggagaatcgcttgaactcgggagtcggaggttgctgtgagccgagatcgcgccattgcactccagcctgggcgacagagctagactcaatctcagaagaaaaaaaaaaaaattagaacctattacgtgccagaccctcgctgtgccatgttggcaggcacagagggaactcagactccgttactgctctcaagcagcagctaccagtccgactgaaagaccaagaccaggtcagtttctttttttttgagacggagtctcgctctgtcgcccaggctggagtgcagtggtgtgatctcggctcactgcaagctccgcctcccgggttcacgccattctcctgccttagcctccccagtagctgggactacgggcgcccaccaccacgcccggctaatttgtgttgtatttttaagtagagacagggtttcaccatgttagccaggatggtctagatctcctgacctcgtgatccgcccgcctcggcctcccaaagtgctgggattacaggcgtgagccaccgcgcctggcccagaccaggtcagtttcttaagtgatctgagctataatggcggtaacagagcactgtgagagcccgcagaaagctcctaacccatctgggatgagacctagcgcttccaggacgagccgatgttgagctgagacctcgaaggacaggttagtcattcaccttctcccgggctcagtttcttcgtctgtaaaatgggctttcatacataaactataaaatggggactattttgttccgccttaggtgggtcgcagcaggaggactagtcactccggagcgacttctaggctgagactaaggagattccacgcaggtccgcaaagtcaggcttgcgcttgctcctgacaccacttcctttacctccacggctccatctttgttctgcgcgagtgcgcacgcgcaggctccgaaagcgggccgtcgcacagagggaccacaactcccagagtgctccgcgtccttgctttcgcctctacttgtgctccagggcgcacgcgcagccctgggagcgggttctcgcgcatagggaccacaactcccagggtgctccgcgtcctcgccgctgtcgccgccgcggagacaaagatggctgcgagtaagtgcaggtgccggtggcgcacggggctcgggtagttctgggaacctctgggcggtcctgggactgaggtgcggcagggcaggggtggaagcgatggggtccgtgctggaggggaacgcagaagtcacgagggggctcctccagggcaggggtggcacgagagggttagaggtcaccgggggcagctacttgcaggggtgacgcttcttgccaccccttcaggagtcggcgccttcctcaagaatgcctgggacaaggagccagtgctggtcgtgtccttcgtcgtcgggggcctcggtgcgtgagtgctccaggcgcaaacttgcatcgtccacccccgtccccctacatccctccatcttgtacccctaaagccctatcgccgccctcgggtcccctctagtgtgtctgcacccccacggcatccccttatctatccccatacccattataacctctccaccatcgccccccgcgttcctctccacctacccaatacgctcttaacccctctaaatgagacgttctcaaccctgcttatgccttaacacctgagcaccaaaaaaaagtccagatcctcctcctccttttcatctttcctctcccccattctgaattgagttggcttgggtggaggtgggactggggaatctgtgtcttgtgaaaatccccgtatgatcccaatgtgccttgctgattgaaaatctctgccctctgccctggaactgccctactcacactttaattagcaccggagttcctgcagggatgggggcgggggattgttaaaatgtagcttttttttttgcgatggagtctcactctcacccaggctgaagtgcagtggcgcgatcccggctcactgcaacctcggcctcctgggttcaagggattctcctgcctcagcctcccgagtagctgggattacaggcgcccagctaattttttgtttttgtttttgagactgagtctcgctctgtcgcccaggctggagtgcagtggcgcgatctcggttcagtgcaagccccgccttccgggttcacgccattctcctgcctcagcctcccgagtagctgggactacaggcgcccgcccccatgcccggctaattttttgtatgttcaatagagacggggtttcaccgtgttagccaggatggtctcgatctcctaacctcgtgatcctcccaactcggtctcccaaagtgctgggattacaggcgtgagccaccgcgcccggccagcttttttttttttttttttttgagatggcgtctcgctctgtcttccaggctacagtgcaatggtttgatcatggctcactgcaacctccgcctctagggttcaagtgattctcctgcctccgcctcccaagtagctgggattacaggcgagcaccaccacgcccggctaatttttgtatttttagtagagacaaggtttcaccatgttggccaggctggtcttgaactcctgaccgcaagtgatctgccttcccaaagtgctgggattacaggggtgagccactgcgcccggccaaactgtaggttctgattctgtaggtctggggtggggcatgggattctgcatttttgaagagttcccaggtcttgtcagtactgctggtccaccagccaggcactaggttaaggttctgaacacttattcagtatggcagccaccagccacaactggccactgagcatttgaagtggtgctggtatgaattgaggtggtataagacactggatttcaaaaacttagtataacagagtgtgtaaactaccaataatcttttgttgattacatggcgaagtgatgttttggatgtactatggttttttttgtttgtttgtttttgtttttttgagacggagtttcgcttttgtccaggctagagtgcaatggcctgatctcggctcactgcaacctccgcctcccgggttcaagcgattctcctgtctcagcctccttagtagctgggattacaggcgcatgccactacacctggctgtttttgtattttcagtagagacggggtttcatcatattggtcaggctggtctcgaactcctgacctcaggtgatccacccgtctcagcctcctaaagtcctgggattataggcatgagccacctcgcccatccaagtatgtttcttaaaatttgtttcatctgtatctcttatttttactgtagctactagaagatataaaattatatacctggctcttaccatctgtcagacagcactggcctagaacattccttttatgaactgtaccccatcccccaggactcctggctcccaccctaaatggactgtggtcagtgactgttgtttgtgcaaccctttctcctccagtttgtaaggctttttttttttttttttttttggtgatggagtctctctctgttgcccaggctggagtgcaatggcacaatctgggctcactgcaacctctgcctcccaggctcaagggattcttctgcctcagcctcctgagtagctgggattacaggctcctgccaccacgcccggctaattttcgtatctttagtagagatggggtttcatcatgttgtccaggctggtcgcgaactcctgacctcaggtgatccgcccacattggccgcccaaagtgctgggattacaggcttgagccactgtgcccggccaaatttgtaacagtcttgatttctccagaacagtcccatgacactacccccaggatgctccatgatgaccctacactcaaacgtgctcattccatgaccaaccccactgctgcctcctccaggccccacgtatctgtgagtgttaggctccaacccctacctccacttaaccccccaaaaaagagttttaaaccctcctgtctataagtagggatcccaaggtaccaaggatcctcctggacgtgctggccctccctgctgccctccccctgcgcactttatcttccctttgccaaggctcaccttctcttcccctctcttcagagccaccttcccctgggcctcacccctgtgtctctccacagctgtaattctgcccccattgagcccctacttcaagtactccgtcatgatcaacaaggccacgccctacaactacccaggtgagtgggggccaggcagggatccccggaataggcccagcctccctgtgctggcgtaagggcagttatgggcaggtctttcctaagcagttatcagagattctgcagtggtgcccggaccccccgttccattttttaagaattgagatataattcgtatactattctgtgtttgtgcttcgtttttgttttttggggtttttttgagacagagtctcgctctgtcgccaaggctggagtgcagtggcgcgatctcagctcactgcaagctcagcctcccgagtagctgggactacaggtgcccgccaccacgacacgcaaactttttcgtatttttttagtagaggcggggtttcaccgtgttagccaggattgtctcgatctcctgaccttgtgatccactcacctcggcctcccaaagtgctgggattacaggtgtgagccaccgcgcctggcctgtgcttcgagtttctattacctttccagatttctgtctctctctgggttcccatctgtggtggtttcttggtctccatcttctcaggtttctgtcctgtttccccatctcttttgaccctagctctctagtgcgcgggatctctccctcgctatctctctggttttccgtgtctctcagtctctgtatttcccgcctctttctgcatcactgattctctgacccttcccctctcacccctggggtcccccttccctctctgaacataaagcgacagaccagctcttctctccagggccctggagacgtgctggtctcagtggcccacctcctgccccacagtgcccgtccgtgatgatgggaacatgcccgacgtgcccagccacccccaggaccctcagggccccagcctggagtggctgaagaaactgtgagcacctccactgacagaggcggcccctcccacggctcccaataaaaatgtgaaaaccaacccccgaacgtgagcatgtgtgtgatcagaggtgggaacaagtagacggtggccggggtgagtgtggggtcagtttattgggcatgcgtcagtcagaggctgggctggccagggtcgggtagggcagcagtttgtctggaccccgagaaacccaactggaatccagggcctcatctgcttcaaagccaaagtcttcctcaaccttaatctgcaggagataaggaacaaggtgttaacaggcctgggaatctagaaaatcccatcagcttcaccatttttgttttcattttgttttgctttttaaagagacagggtctcactctgttgcccaggctggagtgcagtggtgccatcatagttcactgcagcctctgcctcccaggctcaagtgatcctcccacctcagcttcccaagtagctgggactacaggcacttgccaaccaagcctaacatgttttttctttttggtagagatggggtctcagtatgttgctcaggcaggtctcagactcctggcctcaagtgatcctcccacctaggcctcccaaagtgccgggattacaggcatgagccactgcacctggccagcctcacagttcttgtctgcccaggccagtcaccttcctccttacacctcagaggcaatcccagtgttcctgggtccagatgttcttccagctttcctccccacactgggccttcccttccactccgtcttctctgatccttccttctcctctactcccagccttctctagctatttttccttctccaggtcttcctctttccctttccaactttgcctcctttttacccaagcctttaccccactttttccaactacttccctgcctgatcctaggcctccaacatgtcctggttcacctcccttctccaactttccccagccctgggcccctcggggtgcagaaccaaaacccaagagccctgaacctaactcagccccagccctggcccctccccttgagtcccccctccttacctgcactggcgccggctctggagccccagtccctccccttgagttcccgccttcctcacctgcaccggggccagctctggagtcagcgcatttcctgctcggcgtccatcccgtggcactcgccgcctcttccgcccactgggcccctcaccgggggctgggctgccgggttctgggggtgcaggagtccttctgggcggggacagtgtctctttctctggaggctcattctccgcattgcctggggtgggggcatccgtgccctggctgccctcatcctggcaggcaggagggggaggtaggtgatgggtgggtcctgagctcccagttcctgaccctcctggaggcccaacactcacctccagcacaatggtgaactggctggcccggtagtcatccccgtaggagtccagcactctcatgaggaacctgctcagggggagaagccaccaacggaataacttatctcctagcggctggggaaaagggccacaggatagagctcagctcccactccactcaacgccaaagctgtcctggagccagacggtcctgagctctggcactggaggcctgggagccatgcccttgaccagccttgagacctcgagcaagacaaggcaaccattctgaggctgagtttcctgctctgcaaacgacatgacaccctcggctggatgttgcagcggtgacactgaagtagtgacaccagacgatttctgtacttaatgtgatgtcagcacttagtaaacattcatatgtgagttataatttttattgataactgaagagaggggagtacagaacgctcctcctaatgacctcacctcttataaacacccccttctcttttttccccagcccctgcctccagagttccttaaggttcaattgatggaatgcctcctctgcaccagcacctgggcaggtttgttgttgttgttttgcgacggaatctcactctgtcacccaggctggagtgcagtggcgtgaatttggctcaccacaacctccacctccctggtaccagcgattctcctgcctcagcctcccgagtagctgggactacaggcgcctgccactacacccggctaatttttttgtatttttagtagagacggagtttcaccgtgttagccaggatggtcccgatctcctgacctcgtgatccgcctgcctcggcctcccaaagtgctgggattacaggcatgatgagccactgcgcccggcctatttcaacttaagtgaaaatctcacctgtggccagcggctaccgtgctggacagcacaggtacggacagaggaaccctgggagccgcaggtttcagctttggggagggaggatgaactagcagaggcagccaagaaggaacagccggaaaggcaggagaccccaggttgctgggtgcccaggatggcaagaatgggctccagggaagagcacatagccctgggccactgtgccgagcctgagccaaggactgagatgagaactgtggttgactcagcaacgtggagccattcctacaaaacttgctccagttttgctggtacagggacactgcgagtggcaggggcagcagccacctgggcaggttctgtggagacacacagtgggaagctctgagctcagctcaccacctgcaagctccgacaaccctgccgcagcctcatgatattggtgctgcccttagttgataggaaacagctcagagaagggacactgcttgcttagagtcacacagcaaaaaaaaaagaaaatacttgcagtcaggtctgtgctcgtgtgccttccatcctgctgttccctcccttcagggggaggatgccctccacccggccctccctcagtcccagtgctcagccctctccacccggccctccctcagtcccagtgctcagccctctcctccaacaccgaatcccactcttcctccttgtttgcctcagcccccggccctcatctccggcttctccttgtggcttgtgagggttgggtggatgtggaagtgggagagacagaggggctgggagcatttgggagctgaggctcacaggcccagaggggacagagaaggggttacctccgttcctgctgcagcctccgagttatcctctgcacctgatggagcctgttcaggacccgctcgttcacctatggggtgggaaacgcccatcagctggatcccacggctcccgttcatttgtttaacggatgtttaatggggcacgcactaaactctggagactggccaaagaccatcccgtggcctgaggtccttccaccttcccatccctccggctcccctctcaccatgccacagtcctgagtgccctccagtgggggccttccgcgtgctgttcctctacctggaccctctccccagtcatccgcacaacttactccccactccaagtcttaggtcaactgttacctgctcagagagcctgaacctcccattaagtcgaaacacaccaggccaggtgcggtggctcacgcctgtaatcccagcactttgggaggccgaggcgagtagatcccctgaggtcaggagttcgagaccagcctggccaacatgatgaaaccccatctctactaaaaatacaaaaaattagctgggcgtggtggcaggtgcctgcaggatagtcgcacgaacctgggaggtggaggggtgaagtgagttgagatcaccccactgcactccagcctgggcaacagagcgaggttctgtttcaaaaaaaaaaattgcaacacacccgaccccccttcccatgccagaaccccacccggccattcactcctggctttatttcctcctagtgctcatctgaggaggcaggacgcagcctctccgcctctttgcttattctgctgactgaccgcctctccagccagagcatgagctgaaaaacgacagcaacttgtttctacatcccgtgccttaaccagagcctggcacgtagtacatcctcgatgaacatttgcagaatcaatgactttgcaaagtgagaagtgcttggtgaataccaaagagtcagacatgctggaggttagggcaggaggtgcgactttagttacgacctgcagagaaggcccgtgggcccagacttgaataaggaggagacaaaggggtgacaggaggaaagtatgccaggctgaggggacagccctgcacgcagcttctgaggactccagcctagacatggagggagagatgtgactcagccaaacagggacccaaagacagtggctgaagcaggtgctgctcctgggtcagaaagacctgagttccgggcggggcacagtggctcacgcctgtaatcccagcactttgggaggccggggcgggcagatcacttgaggtcaggagttcaagaccagcctggccaacatggtgaaaccccgtctctactaaagatacaaaaattggccggatgttgtggcacatgcctgtaatctcagctactcaagagtttgaggtcgggagttgcagaccagcccggccaacatgatgagacctcatctctactaaaaaaaaaaaaaaaaaaagaaaaatacaaaaattagctgggtatggtggcgcatgcctgtaatcccagtttctcaggaggctgaggcaggagaatcgcttgaacccaggagctggaggttgcagtgagccgagatcacaccactgccctccagcctgggtgacagagtaagactctgtctcaaaagaaaaaaaaaaaaaaaaagtgccaggcacggtggctcacgcttgtaatcccagcactttcagaggccaaggcgagcggatcacctgaggtcaggagtttgagaccagcctaacgtggtgaaaccctgtctctactaaaaatacaaaattagccaggtgtagtggcgcatgcctgtaatcccagctactcgggaggctgaggcaggagaatcgcttgaacccaggaggcggaggttgcagtgagctgagattgcagcattgcactccagcctggacaacaagagcgaaaatccatctaaaaaaaaagagttcaagttttggctctggcttggcacagtggctcatgcctataatcccagcactttgagaggccaggagttcgacaccagcctgggcaacagagtgagaccccaacactcaaaaactaaccaaaaaaattagctgggcttggtggctgtagtcccagctccttcggaggctgagattgctagagtccaggatgttggggctgcagtgagccacagtcatgccactgcactccagcctgggcaacagagaaagaccctgtctcaaaaaaaaaaaaaaaatctcagatctgccactgctgagctctgagcttgggtgcattacttaacctctctgagccttgattttctatacttgtaaaatagtagtaatctattcctgggggtggattaatggcagaggctccagttgagtccgtttgggccttggtgtctgtctgttaaacagggtttggaatatgcccctggcctctagccttcctccttacagaactccccaatactgtcattaagaattgaggccagatgtggtggctcatgcctgtaatcctagcattttgggaggtcaaggcgagtggatcacttgaggtcaggagttcaagaccagcctgggcaacatggcaaaaccccatctctacaaaaagtacaaaaattagccaggtgtggtggtgtgtgcctgtagtcccagctattttgggggctgaggcaggaggactgcttgaacctgggagactgaggctgcaatgagctgagattgcgccactgcactccagctttggtgacaaagtgagaacctgtctcaagaaagagaaaaagagttgaaggccaggcgtggtggctcaagcctgtaatcccagcaccttgggaggctgaggtgggcagatcacctgaggtcaggagtttgagaccagcctgaccaacatggtgaaaccctgtctctactaaaaatagaaaaattagctgggtgtggtggcgggcgcctgtaatcccagctactagggaggctgagtcaggagaatcacttgaacccaggaggtggaggttacagtgagctgagatggtgccattgcactccagcctgggagacaagagcgagactccacctcaaaaaaaaaaaaaaaaaaaaaaaaaaaagttgaattatttcccccaaaagagggtgttgaggctttaacccccagtacctcaggatcaccttatatggagacagtgtcgttacaaaagtaatcaagttcaaatgaagccagtgggtgggccctaatccagtatgactggagtccttataaaaagggtaaattgggacacagacacacacacagggagcagcaatgtgaagatgaaggcggagatcagggtgatgtttgtacgtgccaatgactgccagaaacctccagaagccaggggagaggcctggaagattctcacaaccctgtcgacaccttgccttggatgtctagcctccagaactgtcagacaggaatttctgtgcttgagggaccctatttgtgataagttctgggagtccaagcagactaatacaactgtcttcagagtttcaggcatccagacctgatgctgttcctcccccatttgaaacccttcagtggctccttcactctcaaggaaaaaaaaatatccagacttcttgtcctggtgttcctggcctgccaagatctgagccctgcctgctgtttaatcctcattgattgattgattgattttgagacggagtctcactctgtcacccaggctggagtacagcagcatgatcttggctcactgcaacctccgccttccgggttcaagcaattctcatgcctcagcctccctagtagctgcgactacaggtgcgcaccaccacacctggctaatttttttgtattttagtagagatggggtttcaccatgttggccaggctggtctcgaactcctaacctcaggtgatccgcctgcctcagcctcccagtgctaggattacaagcgtgagccaccatgcccagcccatccttattctcagcaaggaggctattgcagtcattcagcccagacagctggagtttgcaatggcagccatagggatggaggagaggagaagggtccagagacactcaagaggcggaatgaatgagtcgagaggagtgaatcctggcaggggtatgggagatgtgaagagcttgggctttcacctgtgagcggtgccacgcattgagaggcccccgggagacatcagagaacccatctgcgttgtcagggaagctccacgggagatggcccttccaggggcccggcacagggccagacacataatgcatgctaaatgactgaatatataagctaaatgactgaatatatcagcaagccaagaaaggctgggcatgtggaaaggcagagattgcggggggcggtagtttaggccaggggaccccaaaaccgggggatccgcactcacctacctgctcgatctcccggcagcgccgacctagtgcctggtactttctgcgatttaattcccgctggcgccgccgccgaccccgggctgcctcttcctcttcatctcgctcccggagccctgagccgcccagaccacctgacacaaactccacttccgtctccagctcgctctccaggatgtggccaccaaataggggaggcaacgccaactctgagcctggcggcgctgagaactcctcaaagcccacggctgccatggtcctgagaggcagggaaaggctcaggggccctggatcctggacccccagccccttctcccactgaaccaggagcccagaccccaacccctcctccctgagatcctagaatccaggcccccagcccctcctccctcagaccgtagaatccagctcccagccctcctccctcagacccagaagtccaagtccgcaacccacccttcgcagcacccacagggttcaagccctgaccccctcctcccaggatgcaagagtccagacctccagactttttctctccaaggacccagggagtccaagccccaaccctcaaccagacgcaagagtcctggcttccaacctcctagtctgtcagatccagcagtccaaacccctaaccttctcctccctcaggatgaccccagtccataaaagggttctaaggtaaagcagttgcatgaactacaacccccatcagacctcagcgtaaaagctcatatggttgcacacaatgcagctgcactgttttctgggattcgcactttttcacaagggctcagccacatacccttctctctgctccaattccatctccgcgacctccggaagccccgggcctcagagcttccgacctcttcaatctgtaggttaagccgttcgcaaaactacttgtcccatcaggctcagcagccgaggacggcgggacgtggccctaggccttgtgggagttgtagtttcctgtttccggcttcgcttcggcccacccccacgtccaccccgaatccctgcttaaaggccttgctttcttgtctaacgccgcaaccagtcctctgagttgccaacgtctttcttcttgtctcgacgccccgtcgtccggccacagcgattctctgcttagcaggatcggtccacagcgggacgtgagtccctttcctcctcgcggcttaccgcctctctccgcctagtgccaggtgctaataaagttgttgtttcaaatgcggccaggaacatcgcgagcggggaccaatcagagagtagctttgcctctataacggcgcgagagtgagacgtcatcggtgagcgactaacgctagaaacagtggtgcgcggagaggagaggtgagtgtgatggggaccacggggagcgggaggctgggctcctgggtctgggagaagaagtgtgtgaggaaaaaggcgggtctttacagcttggtttttgtttttttgttgtttgtttgttttgagacggagtctcgttctgttgcccaggttggagagcagtggcgcgatctcggctcattgcaacctccgtctcccgggttcaaacgattcttctgcctcagcctccagagtagctgggattacaggcgcccgccaccacccctgactaatttttgtatttttagtagagacggggtttccccatgttggtcaggctggtctcgaactcctgatctcgtgatccgcccgcctcggcctcccaaagtgctgtgattacaggcatgatccaccgcgcctggccagttgtttgtttgttttgtctgagacggagtttcgctcttgttgcccaggctggagtgcagtggcgcgatctcggttcactgcaacctccgcctcccggattcaagcgattctcctgcctcagcctcccgagtagctgggattacaggcgcgcaccaccacgcccggctagttttttgtatttttagtagagacggggtttcactatgttggccaggctggtctccaactcctgacctcagatgatccacccgcctgggcctcccaaagtgctgggattacaggcatgagccaccgctcccggccttttacagcctgtttacccaaaagtcttaatatgcgcctaccatggtgtggccctggggatgtggaaggagcaaaaattgttcgctaccctcttagagctttggttgatgcctggcagacaggctttatcaaataattacttcattaatcacaaatgtgtgaagtgccttactgtagacacgcagagcgtgcgggacacgttatcacaaagcaacctcctgtagtctagagtggggcgtgtgggtcagggaggtggaacgtgagagctgaaggctgaggagatgctgggctactaagaagtgaggagagccagacgccatggctcactcctgtaatcccagcactttgggtggcccaggcgaaaggatcgcttgagcccaggagtttgagaccagcctgagcaacacagtgagaccctgtctctacagaaaaatttaaaaattagccgggcgtgctggtgcgtgcctgtcatctcagctatcgggaggctgaggcgggagaatcgcttgagcccaggtgatcgaggctgccgtgagctatgatggcgccactgcactgcagcctaggtgacagagcaagacatggtctcaaaaaaaagaaaagaaaagaaaaaacaaagtgaaggaaagggccactttagttacaagggactcctgtacaaagacctggaggcgggaagagaccgataatgtaaccaactcaagtttctgctactcagaggcagaggaagtggggggtggtgaaagtaaagcagctttactgatcaaatgctcgcagatgagaaatggccaagctaatgtctttagaagaccatttcaagctttaggctggggagaggggcttaaaaaggggaactttgaatgggaggcatacaggagtggtgctgggtacaaggtatgtgtgtcttgctccgaaggctgtcttgagtcacgggccacctggagcatgggctggtgtcaagtcaacaatggccacgttgtagattgatcgccttgaggtgatctctggagttttgcagctgggtttccatacctagtttgtttcaagattagcccctgcggcgaggcgcggtggcttacgcctgtaatcccaacagtttgggaggccaaggtgggtcgctcacttgaggtcaagagttcaagaccagcctggcttacatagtgaaaccttgactctacaaaaaaaaaaaaaaaaaattagctgggcatggtggcaggtgcctgtagtcccagctactcaggaggctgaggcaggagaatcgcttgaacccaggaggtggaggttgcaagtgagccaagactgcgccactgcactccaacctgggtgtcagagccagactccatctttaaaaaataaataaataaagattagcccctggaacttctaagtaagcacatagataagccagcagtgcaagacagtatctagtgggaaaggagggaaacaaagaatttcaaagtatgttttcaaggctaaaggcaagaaaggaataagaaagtttgcaaatgcatttggaatctacaccacttggttccagtaagtcttagcaaggtggcggtcataggggtgtgctgcgtcttgcacaggtcggagctggagactcgccagtgaacaaaacaaactaaagcacctgttgtcgtggagcctgcatgctagtggggttgataaagaaggaccagggtcttctgggggagaatcatcgctcagtaataaggagggactttgtcggggcaagtttttagggaacgctgctgtccctccccaggcctcgggatgtctctggcagatgagctcttagctgatctcgaagaggcagcagaagaggaggaaggaggaagctatggggaggaagaagaggagccagcgatcgaggatgtgcaggaggagacacagctggatctttccggggattcagtcaagaccatcgccaagctatgggatagtaagatggtaagaggacaagaggtgttcctagcagggggctctagacagaatctcccagaagggggtgatacaggcttctttttgaagagtgctggattctgactgtcttctcctttcctacagtttgctgagattatgatgaagattgaggagtatatcagcaagcaagccaaagcttcagaaggtgcttcctcccactctgtgcccctccccatctcctgtctctcctgccaggccccctggctccctggctgcttgtggctgggtatatctccttctcagccttttccagagccttcttttttttttgtttcaccccaacccgttcccttttccactaaatatatattgcattgtaaagctcatgcttcttaagtccttcctgtgtgctgagcttactgatcatgataggactcagcttgaggtttcccagacttcactgattcacatgaccggttacagggtttttgccacatctataagccgcttatcctattatttgcttaacatattctttgagtctaggactttttttcttaaatttatctgagaaggaagcaaattgctaccatgaatggaaaactggtatcatttggcaaagacaaagtcactgtataaaaatagatatataattatttaggaaccacctaaggccgggcgccgtggctcacgcctgtaatcccagcactttgggaggcggaggcaggtggatcatgagttcaggagatcgagaccatcctggctaacacggtgacaccccgtctctactaaaaatacaaaaaattagccaggcgtggtggcgggtgcctgtagtcccagctactcaggaggctgaggcgggagaatggcgtgaacctgggaggcggagcttgcagtgagccgagatcgtgccactgcactccagcctgggcgacagagcaagactccgtctcaaaaaaaaaaaaaataacctaaaaccttttctcatgcccaaattgagagaacactagcttatctcatgagtgctcagactcactcttaagagggcagtcctgttaccattcctattcttttttttttttccttgagatagagtctccctctgtcgcccaggctggagtgcagtgatgtgttcttggctcattgcaacctccacctcccgggttcaagcgattctcctccctcagccttatgtatagctgggattacaggtatgcaacaccatgcctggctattttgtattttttagtagagatggggtttcaccatgttgaccaggctagtctcgaactcctgacctcaagtaatccgcccacctcggcctcccaaagtgctgggattacaggcatgagccactacgcccagccttcccattcttcttgaatggaatttgttgatgacaggaagccataggaggtttctggggaaagaagtgtagtgagagggcagagtttcgggagactcactgcttgctttctttaacgtttacctgggcacccagttgaatcgcccaggtctttgctctcaaagtactcaaggtctagtggaagaggcaggccaggttccagacagctatcagtggtggtaccaagctggggacaccggagccacaggagggactggctgaccctgccccaggtgtcaggaagaatcgatagctgaattggactgtagagcatgaatgcatgtgccaggcaaagaaagggagaagggggcccagggaaagacagcggcaggcccggggcctcagatatccggagagagaatcctgcagagttccagatgccaggccaaggaatttctccctccagagggttatgggacacagaaagtgacatttcctgatgtcaggccaggctcagggatggagtcagaccccgtcacacccggtgtctggttgaggaggcagaggtgaaacatctcacaagctgtggcagtccctgtttactggaggtgcacaagtgctgcgggtacacagaggaggcgtctgatccttccagaaagggagggaaggattctgagtcgctgcctgagtcttaaggacttaaagagccatttgagcatcagggttaggagtgcagactctgacgccgccctgcctggtgtcagatctgagctctgccttctactggctgtgacatcaggcagttagtatttgcatgacttttaaacacaacatctttttgtttgtttgttttttgagacagggtctcactctgtcacccaggccagaatgcagtggcacgatcccagctcactgcagccttgaccttgtgggctcaggcgttcctgcctcagcctcccaggcagctgggaccacaggtgtacaccaccatgcctggctaattttttttctttaattatgtgtagagatggggtctccctatgtcgcccaggttgctctccaactcctgggctcaagcagttctcctgcctcagcctcccaaagtgctgggattacaggtatgagccactgtgcctgacctcttattactaaagcacaaagaagcgttttccagaaacagacgtggggtaagggatgctctggggagagggagcagcacatgcagaggccaggaggggtctggcgcggtggctcacgcctgtcatcccagcactttgggtggtcaaggcagatggatcacctgaggtcgggagttcgagaccagcctgcccaacatggtgaaaccccgtctctactaaaaatacaaacaaacaaaaaaaattagccgggcatggtggcacatgcctgtaatcccagctactcaggaggctgaggcaggagaatcgcttgaacccaggaggcggaggttgcagtgagctgagatcatgccactatactctagcctgggcaaccagagcgaaattatgtctcaaaaaaaaaaaaaaaaggctaggaggagtgggtgtctggggcactgtgatcactcctttatggctggagtggaataaaatgaggtgtggtgagaggatggggcgggaagggcgggaggccagactgcagagctgctgagtcagcaaacaggaacgggggaactccctgtgtgccaggtgctgtcctgggtactcggctgtgggtacagccaacgcaggcacagcactggtccctgcagagcttccggagttggggaggccctgaatgtcagtctgaggactcggtcattagccttggggctgtggggagccgtaggaggtttcacacggtcagttctggggtagatggggtcaagtctagactggtgtggagggagagggattgaaggcaggaacacaagttcagggatgtctgcagacatcagcctgtccctggtttactcttcagcccctccttcctgacccctcccaacttcatcctccgcctcctccagctgcgggacccgagagggggtagggatttagatactcacacccatgcctccgtgtcctcacagtgatgggaccagtggaggccgcgcctgaataccgcgtcatcgtggatgccaacaacctgaccgtggagatcgaaaacgagctgagtgagtgctggggggcaggcggagacagccccgtgtgacgtccctcacgccccctctcccttccccactggcctttcccagggtcctgcccctaagcccaagctcagatcgaggttgacctgctgtcacagagtggctgaaataagaaggaagtgcgttctctcgcgtatgagtctgaggagcactcggggatggtgtggccgcttggctgcctgtagggccccggctctttccatcctgttggtcggccacctgcctcacggtgcgaggtgactgccccacctccagccatcacctccgcattcccaccagcaaggcgcttcttttctttaagaacatgtcactgcagctcacgttttacagaccagaactaattcccctggtcacacctagcggtaaggacggctgagaaaggctgtatgctggtgcccgtgtgccaggccacaagccagggcttcagttactaaaggaagaaggggacatgggtgttagggccaaccagcagagtctaccttccatctcacccgacaacctcctgtcccgtttaccctagacatcatccataagttcatccgggataagtactcaaagagattccctgaactggagtccttggtccccaatgcactggattacatccgcacggtcaaggtgagcgcagagaaggtggggtgcttctgctggcgtgaaggggcaggcggggctcactctcggaccccctcccagaggcctgagggtctggagacgatggagaggagtggacgagggctcagtggtctgctctgcccagcgtgggagggacggagcctggacaggactttctcagggctcccctccaaccccagtctcccgagagggcttccccgctggcctgacccacgctgctcccgctgtggttggagccggtggcattggagttgacatccgaaggttgacacagggcaggcacacggagatttgggggagagagacgtctaagtgcagagagctggagagggaacaagtggggaggaagtgaggcggggaaggaggggacggggaagaggtcggatcacgtccagcctttgggtcttaggagaaagccaaggaagggtttcggaaaagaggggcaggtgtgcgtgagggcggggagaggaggaggtccccacgcatgtccaggaaaggattaggatggcggtggggaagcccctgcagggaagcgaggccgcggatttgcactccgacttgacgcaggccagaggcttgtgaggccacagtctttccagacgccactctgcccgggctccgtttccaggtcagcgaaagcagggcagatggtgtggatgcttgacgtggtggaggcaggaatggtgtggatgcttcaggcggtggaggcaggagaggcccccagtgcagagaccctgactgtcccagtgtccctaagaagagacctgaggaggtgctgagcaagagaggttctcgagccttcctgagttcccgagcctcccctatcttctctgctcgcccccaggagctgggcaacagcctggacaagtgcaagaacaatgagaacctgcagcagatcctcaccaatgccaccatcatggtcgtcagcgtcaccgcctccaccacccaggggtatgtccgcttcgagggaggcgccgggccctaatgggattggggattaggctggagctacacacgcaggtgtacacacgcacacacacatacacacatgcacacacacacacagaaccgagagggctggggctgggcacaccaggcaggcgggagacccaggaggctgggcccacccgcccctgcaggcagcagctgtcggaggaggagctggagcggctggaggaggcctgcgacatggcgctggagctgaacgcctccaagcaccgcatctacgagtatgtggagtcccggatgtccttcatcgcacccaacctgtccatcattatcggggcatccacggccgccaagatcatgggtgagtccccgggctgggtcccatggagcgggggtctgctgacactgtgaccttgggaaagctacatccttttctgtagaatgggggctttggcacctggacctcagcaccccgtctccctggacatcacagaggtcagccagcctggcacacagcaaagcctcatctgtgggaaaaacactcacccacagctccttctccctcccctgtgccggaaacccagagatgaccacacccaggccctgttgtcagggagctcctggtttggtgaaaatggttccaaaacacagccatccctggaacggcgttagtgtggcttagcacaaacgtggtggtcagcttcctgttgggggcctcctccctgcacccccaggccagctgccctccctctctgagcctcctttgcatctgccccttgcggaatgggccaggtcgcccgcctggcagggccatcgaggaatccaaccagaacttcatgtaaaggtgcccagcacacgtcgagcccccaggcagatttactcacccccacctctctgctttcttctgaccgcccccccttcctccctccctcccaccgcaggtgtggccggcggcctgaccaacctctccaagatgcccgcctgcaacatcatgctgctcggggcccagcgcaagacgctgtcgggcttctcgtctacctcagtgctgccccacaccggctacatctaccacagtgacatcgtgcagtccctgccaccggtgagcccactgcgtcatggcccctcccccggcccccctggagccttccgctgtgcccagacagcctgagcagccacccaccatctggcccagctgacggtagcactcaggagctgggaacagggtggcatgggacgtgagagccagggctctgcagcagaccagctccagcacccaccagtcaggtgactgtgggcaagaggcatgagcgccctgtgcctcagtctcctcccctatcaaatgggagcacagcgcctgcttcatgagttgggacgagggctcagtgcacatgaagcacttacagttcaggcctagctcacgacaagcagcgtcgggttagcgtgcaactgctccgaagaccaccctcaggtttgaccattcactagaaagactcacagaatccactgagggctgcacatcagccatggggagagacacacaggaggggcaggagaggtcaccaacctcggagcttcccgggtcctctccctgcagtcgggacacatcaccatcccagcatcgacgcctgacagcacacacacaggcccgctagcctggcggggcgcagtggctcgtgcctgtcatcccagcactttgggaggccgaggcgggcagatcacctgaggtcaggtgttcgagaccagcctggccaacatggtgaaaccccatctctaccaaaaatacaaaaaactagctgggtatagtggcacacacttataatcccagctacttgggaggctgaggcaggagaatcgcttgaacccaggaggtggaggttgcagtgagctaagatcataccactgccctccagcctgggtgacagagtgagactctgtctcaaaaaaaaaaaaaaacaagcaagacaggttctgggacagacaggcctgggtccagaccctgctctgtccaactgtggcgagttacctcaggctcacggccctgtgccctgcctggcctcccccagggatggggagaacaatagcactgatggccaaggctgggcaggcacttcctggccccaccccccagccctgtgtggggttttttttgtggtcttttctgcgaccctttaggtcaggcactgctactggaacacacccagggaggctggcaggtcaccccatcctgggaggagagagagtgggcgatagaacccaggacgggtgggcctggggctcggggctccagctgcctcactgcacccctgccatcgccaccgcctcacagccctgggcatatgggttaaacctgccccagggagcctgatgtcttgtcacccaggcctctgcctcttcatttggccatctcacatcggtccaggcacaggccgtagacaccacaggcctgtaagggaggccagggctggccatcgcttcactgtggctgacagctgggctctgtttgcagtttggattggaaccctggctccatcacctgctggctgtctccctggccacatgacttgaagccttggtttccacatctgaaaagggggtgcaatgatcacaccagcccgatatttgaatatttgatgagatgatccgaggggcgtgcttagcatggggctggcatccaggccgagtgcactccccccggcgtctccacagtcaccaccgtcctcgttgtcagcgtgccttactgtcatccttacctgatggccacttatcagctgggacatggctctgtgccctgccctcatcccctcttcctgtgaagtaggagctgagagcacacacctctagagcccaagggtggaaagcccccttccaggaccccaggtagagccagaggaggagcgcgcgcggttgctttgctgttacctctgtctgtctgtctcacacagattccacccccgttttccgttgctccaggatctgcggcggaaagcggcccggctggtggccgccaagtgcacactggcagcccgtgtggacagtttccacgagagcacagaagggaaggtgaggagggaaaggtgaggggcggccgggcgtcttttcctctgggcctggggtgtctctgcagggagaccctcagcagggagcccaccccagcgagcactgtcctaccaaggcggaggcagtgcttctgcccaccctccctggggtcaggcacccccttccccagtggggtttcctaggtctgctgttggaaggtagcatgaacctactggcttaaaacagtgcaggtgtggccgggtgcagtagctcacgcctgtaatcccagcactttgggaggccagggtgggcgggtcacaaggtcaggagtttgagaccagcctggccaacatggtgaaaccccatctctaccaaaattagccgggtgtggtggcacgcacctgtaatcccagttactcaggaggctgaggcaggagaattgcttgaacctgggagacggaggttgcagtgaactgagattgcatcattgcactccagcttgggtgacatagcgagactccatctaaaaacaaaaacaaaaaacagtacaggtttattatctgtggtcctgtaggtcagaagtccaaaatgagtttcactgggctgaagtcagggtgtcatcctggagcgttccttctgggggattcaagggataatccattccctggtcttttccagcttctaggggtcactggcaccccttagctcgtggccctccctctgtctgcggagccagccacatagcaccctcagacctctctctgactctgcttctgtcttcatatctccgcctctgtttttgttcccctcttctattttaagggcccctgtggctatactgagcctactcagatggtccaggatagtcttcccagctcacaatccttaaaatccttcttaacctcttcacgtcccttttgccctgtgattctgggaattagaacatgggcctctttgggcatgtgtgtgttggtgggggcgtaatttgccttccacaccaggatctgtccccgctgcaacaggggatgttattcaagtaattattcagttaccttctgtcttccttggtagatgtactcgggagaggagacgttttctgtcttgtgaactgtcgtttgccaagcacccggcctggcacagcgttcaggtgttccgtgtccccttctcctttccctctccccatctcacccctggtctgggtgtgggggtgcagctgtgagtagcacagacaggacccctgccccgtggcgtggacattcttgttggggccgggtcaaagagacagtcaacaggtgaactctgtcctgcgtctagcggtgctaagtcaacaccaagaagaaaaagaaagggggtggcggtgaggcagcattaggtgctgatttaactaaggcacgtggatactcggggggcccgctcagaggaggcctgggtgggcagcccacgcgagcagctgcaggacctccccctcgccctccccaggtgggctacgaactgaaggatgagatcgagcgcaaattcgacaagtggcaggagccgccgcctgtgaagcaggtgaagccgctgcctgcgcccctggatggacagcggaagaagcgaggcggccgcaggtgaggggccctgggggtccggtaggcatgggggtcatggaggggagaagccggcgtcctcctcccagccgactccctggcgccgcccacccacccgtccccaggtaccgcaagatgaaggagcggctggggctgacggagatccggaagcaggccaaccgtatgagcttcggagaggtcagactcccagagcgccctcctcaaccccacagccagccagccgccaccgccctctgcctcctgccaccgcccctcctctcgtcctgtggccctggctcatgtctagggcgctgccccagcctccccccccccggcctctattctcgtttccatccgttcagccccaaagcgaccctcgcgacccttggagcctgtgtctccgctgcttagagcccccgcggcttcccatcgccccgggctccttggccggttcctccctgcccagaggctccttagtgccctgctgcacggccgccccgtccctgggccccgccagtctcctctgttatcccagcgtcatccccttggtcctgcaggaccgaactcagaggccacctcatcctattaaacctgttctggttcctgacatcccccgacccacacgagtaaggaaggaatggcctcccaactctgagctcacagagcagtgctgggaccgggcccctctcaggctccccagcatcccccgcgtgtgtgggcccccaggcctcagccgggccgagtgggtaccggagcaggtgcccgtgggaccggccggctggtgaccgctgggcttcgggctggtggagggggtgcctcggtggctggagggcagggcctggtcgctgaactgcagggcgcctcctctcccccctagatcgaggaggacgcctaccaggaggacctgggattcagcctgggccacctgggcaagtcgggcagtgggcgtgtgcggcagacacaggtaaacgaggccaccaaggccaggatctccaagacgctgcaggtatgggccagacccaggtggggctggggaccgagggacacaaggtggggggagcccagatcgcagcctccctgtcctccccacagcggaccctgcagaagcagagcgtcgtatatggcgggaagtccaccatccgcgaccgctcctcgggcacggcctccagcgtggccttcaccccactccaggtacctcccctgggccggctctgtccccagccctgagaccttggcaaggccccttgccctctgcccctgtgaagaaggccaggatgagtctcctcatggggctgttgtggagggtgtggtgacgaggtatgcagaggacgtagacagctcctggcacacaggaagaggttagcagagacgagagcccagcgctgagcagtcctcgtgagcacgcactgctttagaaccaggcccacagctgtgttcagggcacccagttcctctgtcgggctgtgagcgggtaacactgctcagcctccaggccctccagttcaaaacggccaggacggttaaggtaacctcaggaccccactcgagaaagttcccggctaggcgggcttggatgtcaagtgtgggtccaggccccagccagtcagcagtgagcagcgtggagcatggcagtcaccgcatcgtcggagcctcggtttaccatccacagagcagggcgagcctgcaccacggaggcgagacagcagcgagctcatctgcccagtcagcgggtgtctacgcagcacctgctgagttctgtcagtgttcccggctctggggatgaagcaacgaatgagagacaagtcttaccttcttggagccagtgggtggccgggcgcagacagctcagtaagatgtccagtgtaggagaaggcagaaatgccaggccgggcgcagacagctcagtaagatgtccagtgtaggagaaggcagaaatgccaggccgggcgcagacagctcagtaagatgtccagtgtaggagaaggcagaaatgccaggccgggcgcagacagctcagtaagatgtccagtgtaggagaaggcagaaatgccaggctgggcgcagacagctcagtaagatgtccagtgtaggagaaggcagaaatgccaggccgggcgcagacagctcagtaagatgcccagtgtagtagaaggcagaaatgccaggccgggcgcggtggctcacgcctgtaatcccagcactttgggaggccgaggcaggtggatcatgaggtcaggagatcgagaccatcctggctaacacggtgaaaccccgtctctactaaaaatacaaaaacttagccgggcgtggtggcgggcgcctgtagtcccagctacttgggaggctgaggcaggagaatggcgtgaacccgggaggcggagcttgcagtgagccgagatcgcgccactgcacttcagcctgggcgacagagccagactctgtctcaaaaaaaaaaaaaagaaggcagaaatgccagggaggggaggaggtggaaggtaggaggtgggacaggggaggctctcgtttcggagcagccagggagggcctctttgagaagatgaggccagtggctgtgcctttccaagcctcccctcctccatcatgaggtgctcaggactgaaaagaacgcacaggaagcacttggcactgggctcaccattagagcccaatgactgggtcctgttattatttttagagacgggggctcgctctgttgccttgaaaatatttaggaagtgccagccaggtgttggctcccattgctgccactatgatcgtcagtggtgttggtgtgatttgtgctaggacctcgggccagccatgtcccccagggactcagtttccttatgcagaaactgggcaggattggctgtcctcaagcattggttgtttttagcacccctgaggaacttcgtacaaatccaggcgccctggttcctccccaccctctccctctagacccactgagtcagaatctcccaagacagggcaactccagggacaggcaaactgtctcatgcccaccaaggcctgagtgccatggggaagggcctggggggctctgatgggtcacagttggggccttctcctcacctaacccatcatcctctctccctcacctgcccagggcctggagattgtgaacccacaggcggcagagaagaaggtggctgaggccaaccagaagtatttctccagcatggctgagttcctcaaggtcaagggcgagaagagtggccttatgtccacctgaatgactgcgtgtgtccaaggtggcttcccactgaagggacacagaggtccagtccttctgaagggctaggatcgggttctggcagggagaacctgccctgccactggccccattgctgggactgcccagggaggaggccttggaagagtccggcctggcctcccccaggaccgagatcaccgcccagtatgggctagagcaggtcttcatcatgccttgtcttttttaactgagaaaggagattttttgaaaagagtacaattaaaaggacattgtcaagatctgtccttggggagtgatcatttttcaaacagccggggcaactagaagaatcagagctgtggagctttgagaaaagagcttggccctcgggtccaagcggtgtctaggcccactcccttccccgttactttctcgtcatgggatcccagaaggaaaaagccctctccaaccccctggagagccgcagtcactttgatagcaaatgatgtggctgccaacagccgcagatctcagcgcaggccgaccgggattgctgtccacctcaggccagcctcctcacctttccaagcctccacacctacgcccaggtgcccaggactggaaagaatgcacagaaagcacttagcatgggacttgccatcagcgccctataaccaggtcctgttatgattgggttttttagagacggggtctctgttgcccaggttggagtacagtgatgcgatgaagctcactaaagcctcaaactcctgggctgggattacaggcatgaaccagcacagctggcctcctggttaatttaaattttttttttttttctgaggtggagtctcgctctgttgcccaggctagagtacagtggtgcaatcttggctcactgcaacctctacctcccgggttcaagcaattctcctgcctcagcctcctgagtagctgggattacaggcatgtgccaccatgtcccgctaatttttatagtttttagtagagacagggtttcgccatgttggtcaggctgttctcgaactcctgacctcatgatatgcccacctcagcctcccaaagtgccaggattacaggtgtgagccaccaccccagccccatttttaaattgtttatagacagggtcgtgctctattacccaggctgggcttgaactcctgtgctcaagtgagctttccacctcagcctccctaagtgttgagattacaggcttgagccgctgtgtctggcctcttattattattattatttttttttttgagacagaatctcactctgttgcccaggctggagtgcagtgggatgatcctggctcatggcaacctccacctcccgggtccaggtgattctcctgcctcagtctcctgagtagctgggattacaggcgcccatgggttttgtttgtttgtttgtttgtttgtttgtttgtttttcagacggagtcttgctctgtcacccaggctggagtgcaatgacatggtcttggctcactgcaaactccgcctcccaggttgaagtgattctcctgcctcagcctcccgaatagctgggattacaggcgcccgccaccacgcctggctaattttgtatttttagcagagacggggtttcaccatttgggccaggctggtcttgaattgctgaccttgtgatctgcccgcctcggcctcccaaagtgctgggattacgggtgtgacccaccgcgcccggccgagatggggttttaccatgttggccaggctggtctcgaactcctgacctcaactaatccgcctgcctcgtctcccaaagtgctgggattaccctgtgcctggcccagcctcttatttataaccagtgttgagggactgtgtggagccgggcacaggcgaagcaggcaggcttcctgccctggtaggacctggttgctataaaagtcctgccaggtgagcagaaggagcacacttcccctcccctgacctccagtcactgagtctcgggaaccggggctcggccaggagcgcctttacttggactgaggggaatgtggcctgcagacagtcaggagagtttccaggggacagcaggggctgtcctagcgggtggcatgaaaccgtctccctggagaggttaaggaagagcaactccaggggttccatttactatgtgctccggagctgggctacacggtggtactaaggaggcagcgctagtcacctgacctacaaggtcgggcttctgttagttacctaagagatgttaccaggacaagcagcagcctggtgggaagatgatgcctccaggtctctacctcctctctctctccctccttctctccacctcccctctctctccctccctctctccacctcccctctctctcttcctccctctccacctcccctctctctctccctccctctctccacctcccctctctctctccctccctctccacctcccctctctccacctcccctcactccaccttccctctctccacctcccctccctctctccaccttcccctctctccctccctccctctctccaccttccctctctcctcccctctccccctccctccctctctccaccttccctctctccacctcccctctccccctccctccctctctccacctcccctctccctccctctctctcctcccctctccctccctccacctcccctccctctctccacctcccctccctctctccctccctccctccctctctccaccttccctctccctccctccaccttccctctccctccctccaccttccctctccctccctctccaccttccctctctcctcccctctccctccctctctccacctcccctctctccctccctccctccctctctccaccttccctctctccctccctctctccaccttccctctctctctctccctccctctctccagctcatgctatctgggtctccctctgactttctaggtcctgtctgagattttgctctttctgttcccctctctgggcctccccgtcaccactctgtgtatctctggatccctgtccttcaacccagagctctgtctctggacctcagtggcaatctctaaatctctctccttcctcaagtcaaaaagtcgacacactcaggaggttcccttgagtggctgaactaccccaggttgtataactcaagtctgttttctcaatgttatccctgaccctctgggtcaaccctgtttgaaaatgacaacctttgctgatctctacatactggtctgccagggaaggacccgtggtccacaaccctgttcagaatcccccatctcccttggccaaaatatccggcatctaccaatggggctgtggcatgagggtgtcaatctcaggaaaggaatcttgagtcgcctgggcctgcagccctcgtactttcagaacagaggttctcagaatttaatgcgcttcagaattacactgaggacttgttaaaacatagttgctgggcccagagtttctgattcagtctagggtggggctcaaaaatgtgcctttcaaacaagttcccaggtgatgggtacgtgcctgacccaaggccacatttcagaagcactgctctagaaaagaagactctgtaagcggctcttacgctgggcgcggtggctcacgcctgtaatcccagctacttgggaggctgaggtgggagaatggcttgaacctgggaggcagaggttgcagtgagccgagatggcgcccctgcactccagcctgggtgagagagacactggctcccacctcaagatcgttttagttggtccagtgtaagcctgggtatctggacttttttattttttatttttattttttgagacggcgtcttgctctgtcacccaggctggagtgcaatggcgcaatctcgggtcactgcaacctctgcctcccaggttcaagtgattctcccgcctcagcctcccgagtagctgggattacaggcacatgccaccatgcccagctaatttttgtatttttagtagagacggggtttcaccatgttggccaggctggttttgaactccctacctcaggtgatccgcccacctcggcctctgagagtgctgggattacaggtgcaatggcgcaatctaggctcactgcagcctctgcctcccgggttcaagtgattctcccggcccggcctggcctctaatttaaaaaaaattttttttttttaaagttcctcaggtaggccaggcgcagtggctcacgcctgtaatcccagcactttgggagactgaggcgagcggatcacctgaggtcaggagttcgacaccagcctggccaacatggtgaaaccccgtctctactaaaaatacaaaaattagtcgggcgtggtggcgggcgcctgtaatcccagctactcgggaggctgaggcgggagaatcacttgaaccccgggaggcagaggctgcagtgagcctagattgtgccactgctctccagcctgggggacaagagcaagtcttcgtctcaacaacaacaacaataacaacaagttcctcaggtgactctgatgtgcagccaagttggaaagtcatcgctagatccgcggtgtgcaaagtgaactgcggaccgtggactgcggcacttgttagaaaagcagaatttgcattttaacacattcctaggtgattccggagatgtctgagaagcgatactttgtccaggggccacagtttgaatagcaaagctctagaacaataactctaggcttcattcccgttgtctgtgtgtgggcctacgaatatgcattttcgcaagcattcctcctcccccttgcctcagaccattctgatgcgggtggtgctgaacggctccatcctccttcacgttcacctctccctgggatttatcttactttccaccacctagacaggaaggggcgaatctggcttcccatctcggttgtgtgaccctgggcaaatgcctcccagttcgtggaagtctcagtgtctagttaagttttcaatcacaagtcattcctcacattcattcatctattcctttgacaaatggttactgactacttcctgcgtgctaagtgctggagatgcaaaatccagacagggaaaccgaataattacgaaaatgacggtagacgtacaaaaataaatcctaacgaacaaggcgcgcaggagcgctccgcccgggagggaggtcagggaagttttctctccaagaagacaacagagctgagacctgaaacgagcaggcattagggagccacccgtctcctctgtaccttctgcagcgtcctcaacacactaaggaagcggagacgcagaggagaatgactgtcccaccatctggtcgcctaaccaggcaggggcaggacaaaaactccatgcctcacgcttcccaaccaattctgctatgcacggtgccagagacttaaagcagtgtctctggtccctttcttctttcactcagcaaataatgaatttcagagatgtgccaacatagaggcacttggagaaagacgaggcagctgagagggaagctgcttacctggccgggacgcaacggttgcgaccaagtcccacttctgccagctacatacaccctctttcacacgctctacgagcagctaccgcccactcgccacgctattggtccaactagcatgaatgataacttttagggccaacgaagaaaaaggggtggactttcttgcccagctcctcccacttggccctgtggctgttttgattggcagatgacttcggctcggcccccgctttaaaggcacctgtctgtctcccattaggtacgcggcccctaacgcccacactccatgccttcctccgctttccccacccacttccaggaccaaccaatgacttcaaggcagaatatgcccccgcaaccaattaaaaagagctctaaacttgacggacgacttcccgcccctggactgtcgtagctcctcccccagaccaattgttttaagagaggggggcggatacatccaatcagcacgacacaggtctcttgattgacgttcgggtcctcgcgctggcgtgttgtgccctgaggcgggaggaggaggaggagcggggaggaaaacctgagccaatcctagcagcctgcgcgggaggccaatcgaacgccgcgccttggagcgatcacccaatccgcgaaagggggcagggcgcatccctgccaggaaccaatagaaagcctccaagggtcaggagcgacgttcagcgggagcaatgactggcctatattcgggactcgggggcgggtcggcgccagagacgagaagagaggaggggaggcctcctccgccgccgccatcttggaccgggcccggtcagcttccgcggagccatcggcagacgccgcggcctcccttgagccccgacccccgtcgtcagaacaaccccgggcccactcccccaaccccacttccgcttcgcgccgctatcgcgatagcgcccgggcccggggcgcgagaaaaaggcggcgggcgctcgcctcccccgcctgtcgcgatacgctcctcagcggcggcgccagctcctgtggtgagagcgtcaggctcgactgggccggaccccttcccttcctccccccggcgccatcggccgccctccccgccgcctcccgccctggcgacaccgccgtctgtcgcgacatggcctcccctcgcctgccccctgccgccgcctctgcagcgcggggctcccggcggggggcggctccctccctctcgccctcccgttcctgcgcctctttcacgttcctcagcgcctcccgggggtccttccgcgacccggaccccgggccccgcccgccgccgcctccccgcgtggcatcgcgtcgggccccccggtaggggtgtgagggtgcgaagcctcccgggcgcgaggtgcccgcccctctccgcgtcggtattggctcctggctggaaggatggaggcgcccctggtcccaggtgcccgccctctcggggctcaggtgcctgcccccctcggcctcggtccttcgcgttgtggggcagcctccgcgccggggcttctccctcgacggtggcggggagggggggtggtggtcgggacgaggaccccagctgggtgggggagtcacccttcccaggaccgaggccgccctccgcatccctcctcactgctcccgggagcgcagcctcccctggatctcaggttccagctgcccgtctgtatcggatgggagcctcttgggagaggagtggaggagaaactccccgttagttggagcctttgccgaagtttccacctctgtagtctgcagctcttccctctcatagcgagtagcgccctgggtggctccagcctcgccatcccgctgcactgggcgcctgcctttttgggggagtttggctttcccccacctggggtacaggaccgtcctcagtgtggcccacgtctggtctcagctctcacacttctttgatcctggcgtctgcccctggctttgcagccttgaactcccctgcatcgtgactctccgaccttctgggtgtgggcgtctcccagtgatatcaggaccactgtggtcttgttgctgggggctgctgggatcccctggcgctcaggtgcctggtgaaagacactaagccgccacgctgtccatgttagtgagctcccactgcgggcagcaccagcccctctttctgagcagtccctgcctctcagtgcagggcggccacccaccccggggtgagctctcctgtccttttggtgaggggttttgatgtctcccctccctcccttcacccctgcctgagtatgaggcttcttccatcttcacaccagtctcctcctttagggtgtcagctctccaaggaccaagaagcccactgcccttgatatttgcatcagatcccacactgtgggtttgttgacttcccatctacccttacgctgggtgtcagcagttggagaacaagggtttcgccttctggccccgctgctggtaccccatgagagtaggaagcttcctagacccgggttcctgtactgcgaggtgggggctcttccctctggggctgtgccttctctccagggtaaggaccctttcttggtgtcacctcccccagggataaggttcttgccatccttggtattggtatggctgcttttctggatttgaggtgtccacgcctctgcatgtgtccccaccgtaaggctgaggacccctctcggatgcaggtgcccccggctaatgcttccaaaaccccctcttgatttgtcactgtatggggtaaggcatagtttcctggctgtgtggatgtaagatacctgagtctcaagcgggagactccactgtagaccctgtccctgggaccagagacttctctggtgtagactttccaaggtgggagattccagccccccacccttggcatggggcatctcagtggagatgactacctctaccccaggccctaacgcatccttcttctggagtctcagagcctctgtgtggccacgtcagcagccacctgggttaaggatcacccttcaacatcacttctcagagctccttgctgcagaggcggaagctctcccagatcaaaggtgcctcatgacaaagaccactctgtgggcacatgacggcccccaaggttaaggaccacccggtgttagtttcccagggctgacctcctgcccctccctcctcgagtctttgtgtggtggtatcatcttccctgagatgaagtctggggggctcttctttactggttttggctctgattttagcgtgttggctcctgtgaggctggtgtcctgctcacctccccccaccccgccacccgccttgtgggtcccttccctgtggggatgtgtgttcctcttgggtaagtctcctcctgggccgaggttcccagattcctcagtgctcttggagagcctttgctgctggagcacaggttcttcacgcctgagagtggacctgcgatcaccaccttccttggaggatcttggtggatgcccccctgactacagcaaatggggctctttcttctctggcggcgtctctgcttcgagactcaggctccagcttcccttctctctggtcctttgctggggggaccagaggtacagataccctcatgatatagggattttcttagcggggaaggtgttgtctctactgtggctaaggctccagcctctctaggggacaagtaccctgggcctctggcacttgccccttctctgtggaggagctgcctcctcactgggtctcagctgtagccgacttcgatgtcacactgttctgtctgaaacatcacctccctgggttagcgctcttgttcccctcctcctggcttgtgacccctccaggacttccttctcttgctgccacagtgtggtctcctgtctgtgggtattcttcctctgcactaggataccagtcctttccgtgtggagacacagggagggcgtcacctgcctaaggtgttgattgccttgtttaggggtgtagaccatgagacctcttctctctctgggctggagcacctgcccatgaccctctgttgggttcttgggatggaaagagggagtgtaaactctcgtttcacattcttgttccccctatgcagtaagaggcttttctgtgttggggtgttggactttggtgaggatccctgcacacctgagctctggtgtccaggcccttgccttgtgtgagctccctgggtcaaagaggctttcccctcctcagcctgaatccccactgtggcaccttctcctgggtccttttgttggttgctttgccttcttagagattccccaggtagggcgtgatagctgacctgggcgggggctgctgcggctttctttaggttgggccttttactgaggagatttaaattccctcaagtgtaaggtagcacccctacctattatcacccagaatgggtccctgcggtgttgggaaaattctccctgggggtaaggtaccagccctgtcctttgtgggcttcttgttctaaagcatatccgtcccatatggttgctgctagtcacatgtggtgattagtaactagttaaaaatgaaaaattcagttcctccattacacttgccacatttcagatgttcagtggccaacagatatgcgcaaatagagtgtttccagcattgcaaagttctgttggatagcactgtttgccagatgttcccttctttgtgggtgaggactcttttggtgtgacttccctctgtattgaggctcttgttcctcagtatggggctgtttctgtctttacagtaagtgactactccagggttccctgccctgcacacgtagagtgggagcggcccgtggatcccagggaactgtgcttttcattgtaggccccctccctggaggggaagagggcaatctccgctggtatctcagaagtcttcttctgaggcataagcctctcttcccagggctcccctggtctcgctgtcaggccctaaggtatgtcttcccttggactaaagctccttggaactcccttttgacctcagtcttctctgggttccaggtaacttcctttaaaataaagacgctcctctcttgaagttttgggttcctgccctgatggtctatgtctccctgactctaaattaccaatccacttgctatgggattcctccgtgagtgcagatcggctccctcacagctgcggtacctttgcaccctcttatcttagtaagatttctgtcttctcccaggtctctcttgggtactgccttctgcccccaaatctctaagccttcttggtattagcttctttgggttaggagtgttatttccttttggtttaaggatcctgctctggaataaatgtcttggtggtttgagtcccttctacttggcattcagccctgtctgcatgagcgggttcagctcttcacagctttcggcatctctgctcgccgtcgttttcccccacccccaatctttcttctcctacctacagcttacacacacacacacacacgcccttctctgtgagctgccagtttcatttgtctcctgacttgtctgagggatgacctctcctagccacctctgcccagcccctctgagtaggaagtgtgatctccagggctaatgcctccatcccagtcatcagctgtgtgcagcatgactgtcctgctctgaaaaacctttttgagtgtattctggggagaaggtactccatgctctaggaattttccacttcctgagtcagaggcacacaaaaaagtatgtaacttttcttgtttcaacaaacttatggggtcccctgttggccagacactatgctgggcagtcaagcgagcatcaggagaactggggctggtctcttgtcagatagcaaatgcttcttctctttaccagtcccacctacctcactatgctgactaggtccatgtctctgggtttttaccagccagggaatacgtgttaattcctctccaatctctcctagcagcgtccgtctccaagagagtatgaagagagtgcgtctgtagggcagggaagatggcggacaagcgcaaactccaaggtactagactgacttcctgctgcacctgtagccacatgctccctcttctgaggactgctctttagatacctgccacctgggcaggattctcacagccttgttcctccctggccaggtgagattgatcgctgcctcaagaaggtgtccgagggcgtggagcagtttgaagatatttggcagaaggtacaggggctgagaccctaataatctgggtcttcagagaggagggcacaggaaggcggctcaggacctctgggtgttgaccagcgggaggggctacatatgcagatgctgaggacctaagagaatcagctctaagatggattgggggtaggggttggggggggtcctcgagtccctagcataaggaagaatcactggagtgggtactgggacatcccctcccacactgacttctcaattctctccatccctcagctccacaatgcagccaacgcgaaccagaaagaaaagtatgaggctgacctaaagaaggagattaagaagctacaagtgagggggctgggggcctggacgcctttgtcctgagggtagagggaactgggagagtggactgctgggtcccagggagaaggagctgtgggccccagttcctgggtcctgaggtctgactttcttgcttttcccatctgcagcggctgagggaccaaatcaagacatgggtagcgtccaacgagatcaaggacaagaggcagcttatagacaaccgcaagctcattgagacggtaggagcccagagcctgagtcccagagaggtgggaaggtcaccagattcttgagatcccaaggggcggaggcagagcggccagaccccagaggtcctcaagagaagtaaggtttctgcacctaagggaagtgaagaggcagcggactcagagctcagaaagtagggtcacgaggctcaggtcggagtgtctgctggcccttagtcagctcctttcccacctttgagagcccccctgccaactgcactctctacagcaaatggaacggttcaaagttgtggaacgagagaccaaaaccaaagcttacagcaaagagggcctgggcctggcccagaaggtagatcctgcccagaaggagaaggaagaggttggccagtggctcacggtgagttggggtagagaagaggaggtgaactctgaggatcctgagccctgggtgtaggcggaaccctagctgatgggcttcctcttcctctccctcccctagaataccatcgacacgctcaacatgcaggtggaccagtttgagagtgaagtggagtcactgtcagtgcagacacgcaagaagaagggcgacaaggatgtgagtgagggagacccgacacctttgggatggggatgggcatgggaatgggctggccagcaggaggccagtcatttatgctcctgggagttggggcctggattcctcaggcggacagggccaacagccgggattagggatttgagagacaggattgggagggcttagcagctgcacgcgtggggcaggaaggaggtcagacagaatctcagggtcccctgggtgtctgggtagaccgtggggcctttgtgaagaggagcgacttgggggaaggtgagtgcaggttgagcttgggccacagagtaaaagtgagacctgaaggacacccatggcaagaggcctcctggcacccagagggccctggtcctagggagagcacagtgggtagagacaaggcagaacatggagaaggcagagaaccaggcctgaaggaagacaggagtctgggacaaagctggatgttggggtcccaggttctaaaatccgggattgtggggtatgagttcaaagggatacaaactgtacagacttgctgaaaccagaaagacagggaggggagagccgggtcctcagggaagctgtgggtgggagagggtcaggaagtggaagatgacagggttgggtgtcagactctgaggggtttgggaaccaggggctttcggggagatgatgggtccttgaacagagcagagatttggaaccaaggctaagatgttaaatcctaaaggggccttgaggggagggcaggagcgaggcttaggaatctgggctctctcagggataaatgggtagggttgggggcctagtgatgacagatatcacaattctaaacagcaagctcctcacaaatgggggttatcattgttactgctggagcaggtcggagggtatctgtatgccagaggcagtcacagtggtgggcgggctcagttgagaaatctgggctgtcaggtgaggtgcagatggaggccaagtcgtgggatggcacaaggacctctgggtcttttagaggtttccaaggactcctggagccagaaaggtgtggggagaggagggagcagtgggatcccaagatgtcaaggctaagattggtccccacagggctcagagggtgggtggaccccatactgccccaccccgaaggggatggcgtggaggctttgggtctccacaggggtcagggactgaggacaggttctgtgggggcaggaggggccaagcaggtgctctgcagcccctgagcctggccctgggctcgccagcagaagcaggaccggattgagggcttgaagcggcacatcgagaagcaccgctaccacgtgcgcatgctagagaccatcctgcgcatgctggacaatgactccatcctcgttgacgccatccgcaagatcaaggacgacgttgagtactatgttgactcatcccaggaccccgacttcgaggagaacgagtttctctacgatgacctggacctcgaggacattcgtgaggccctggggctgatcgtggcacaggaagtgagggcccagaatgggctgtgtgagccagctaagcatgcccttcttctgcccccacagcacaggcgctggtcgccacctccccccccagccacagccacatggaggatgagatcttcaaccagtccagcagcacgcccacctcaaccacctccagctctcccatcccgcccagcccagccaactgtaccacggtgaggccccacgggacactagtaccttgtgtttccagcagggcaggactcgaggagacaaatctgggtcactccaaagtggctatgggagcgtaattgaggaaacacagatctaggtatccagggtctaggctcttggagcacacgctaaggtcctatatctgggtccctaaaggacataaagagcaatagggtgcatcccgcgccagtttaggtcctggatctgggaagtgggaggggccggtgcctgggctgcctgaggaggctgggtagctggccaccttgggcagggatccaagggttggcttccctgtggagagcaggttcccagatccttaagaggctggtgggtcagtgctggctcccagaaaacaagaagactggagagcctgaattgagatggtttctccaggcagattaaggacagccatttgaccagctctggggccgcaatggcagtcaattgggcccaggtccccggggcattcagagattggcggttctccatcagagccccagaggtcacacaggtttctattctgcctcccctacctcaggaaaactctgaagatgataagaagaggggacgttccacagacagtgaagtcagccaggtgggtgtgagcctggaccgggtgggcacgccattcactcctctgttgcttcccaaaggcatcttgaggcctgagcgccggccactgtgctgggctggtggacacaggtggctcagaaatcagtgctgccctgagggcaggtgggcagggcaagtggacaggtgactggtgctgtggtcaagggggtagcacacaggtcacccttggcctggccaggcagtcaggagatgctgctgtggagtgccctgggcttcacagtcaggtgagtttgcctggcagggagaggtggcagccagtaacatgggcaagttgtgacagaaagtttggaagtgaggagagatgagtctggccaggtctgcagggccaggggcccaactgtgagcacagggactgggactgtcaggctgaggggctcaggctttgtggacctgagtggcctccagagtccaataagcctaggaagcgatggggcctttgctgtgctgataatacacactgcaaatttctgagaggagacggtggcgggcagtgcttcttcaactcctttgacatctcccaggacaggagcacgctttcggaaacgctgctacagaacaatgttaggcaggagcagcatgggcctgaggcccctctgtgggctaacgggatggatggttccaaggggacaccctgagtgggcattgaggaggctggtgtggagactaaggggacccgcaggtagtagtgagggcgggcaacagggccaggaggtgatgaggagagacactgaggcaggtactccaggggccaggctgggctctgccaccttcccaggcccccactgccaagcagcgatgcccaggagagaagtgggtagtcagtcctgttgggcgcttggtaagcgcaaggtgcctgtggggtggctggaaagaagcccaggaggtggttaggctcagcagcccgagtgctgtccgcagattgcctgcggtagggataccatgagcacatttaccctcccaccactttctggagtgctggtaacttccagccctgtgagtagcttctgtgacccttcaggtgacattcagaattactatccaatttccagctgtttttccttctactcttggacattaggcggctccagctaatctcatattgagaacacttaagtgtttcccactagtcctctggcttccaacagatggatcttctctggctgacaacctaagttgtgtgtcagatccctgtgggggtgtccatggggcggtgtccaggcaggacttgggaagctgggcaggctggaaatcagtgtgagtgttttaagcatgaaggtgattgaagccatgagggtgagtaaggtcacccaggtccccaagagggcaggagcaggtgggggcagcgaggccagagaggaggctgctgggacaaagatggagcctgaggtgggggtggtgagggagaccagctggcccactgggtcctgaccctctgctctctcccacccgcagtctccagccaaaaacggctccaagcctgtccacagcaaccagcaccctcagtccccagctgtgccgcccacctacccctccggccccccgcctgctgcctctgccttgagcaccactcctggcaacaatggggtccccgcccccgcagcacccccaagtgccctgggccccaaggccagtccagctcccagccacaactcgggcacccctgctccctatgcccaggctgtggccccaccagctcccagtgggcccagcacgacccagccccggccccccagcgtccagcctagcggaggcggaggcggcggcagcggaggcggagggagcagcagcagtagtaacagcagtgccggtggaggggctggcaagcagaatggcgccaccagtgagtgaggaggcagcggggtggggggcgtgggcggggctgggcagcaggcagcagccctttccatttactctttgttcccaggttacagctcagttgtggcagacagcccggcagaggtggctttgagcagcagtgggggcaacaatgccagcagccaggccttgggccccccttccggcccccacaacccacctcccagcacctcgtgagtgtctcggccatcggcagggttgggatggcagccttttgaaacagagaggcgcaggcgcctcacccccgcatcggtgggttctgaaccccccgcccttgctgctgggaatggccaagcgctatcctccatctccctcgggtgttacacccccacttctttccagcaaggaaactacatcagcctccctgctttgcccttcagaacattctaaaatacgttctcatctaagtggaagttttctcaagagccccataccctttcctccccatttctgttacctgcctgaggccaattgactgccaccggagggtcactgtttcacttttcaaagtgaattgtcccgaagtccttattcctctgcagccactccttcaaatcttagctcagaccattccactgggtctgcctgtttcccgaagaatgccctaagaaagatcagtgtgcacaaaggaaaggcctgcttcctgccccctcaccccagctccagctggcctgcccaagggggagtgggccctgtgaacacctgcccagggcaagtggttttgatcagcctgtggcctggtggagcacccgagaatcctcacccccacccccacagctctgctctgctgatgagaaaccattccaaagattgggctctgcctttgtttgcccagagaaccacttctttctcccatctgtctgccctcacctgcccctctcagatcccatctgatctgtgcagtctcccctctctccagccaggcctctctgcccatcccaccctcagggaccctcctctcaaccccctcttccatgctctctctccaggaaggaacccagtgcggcagccccaacgggggctgggggcgtggccccaggctcagggaacaactcagggggacccagcctcctggtgccactgcctgtgaatcctcccagctccccaacgcccagcttcagtgatgccaaggcagccggtgccctgctcaatgggcctccacagttcagcaccgccccagaaatcaaggtgggctcctcggacatcccccgagcctctgtgtcctgactctgttgtttctttcctccaggtctctagctgcaccccttgcccccaccctctttctggatctctctctggctttctgtccccttctcacacttgctctttctccaggtctttctgtaccaccctccccgtgaccttgatctctgggggctctcatacctcctctcttgttccctccaaagctctgtttctctgggtctcttttcctttctcttggttgcacttgttgcttgctctctctgggtctccatcttcatcccccccgcaggccctcagtttctgtccccgtttgtcctcacaaggcatagactggtgtactttctgcacaagtagaaagactggttgggtgaatgcagcctggttccaccctttaggaagcttccctgctggggcagctgcagggaaggttgcggtgggcccaccgaggggcatctgacctgacctgggagacaggcccaggaaggtctgagagggggtgatgtttaagctgagacctggaccaggcaggggggctaacagctgcaggaagggcttcaggaggtgctttaggaggagcatgcatctgcctgtgtgcttaggaagctgggcaggatgcagcagagaggagagaggtgtccactctgcaggagacagtgccaccagctgcagggctgagatagtgggtgtagcaggataggacggtggggtcctgatcatcgagggtcaggagctggggcttggcttgtgagccagtatactgtagcgcagcttccatggggggaccagtgtgtatgcccaggctgtccaggaggcagtgtgcgcgcccaggctgtccaggaggcagtgtgcgcgcccaggctgtccaggtccaagtcttggcattgtcctttctgtgccttcatctgggaaacggcaatagtcacgattatacctactatgtagggttatttggaagactaaatcatcctcataaagctcttggaacagtttctggcccaacagaagcattaattttttttttttttcttttttgagacagagtcttgctctgtcacccaggctggagtgcagtggtgcaatctcagctgaatgcaacatccgcctcctgggttcaagcgattctcctgccgcagcctactgagtagctgggattacaggcgcctgccaccacgccaggctaatttttatatttttaatagagatggggttttgccatgttggtcaggcaggtcttgaactccgaacctcaggtgatccacccaccttgacctcccaaagtgctgggattacaggtgtgagccaccgtgcccggcccaaattttagaagtaggtggacaggatatttatagtgcgtgcatttttctggaaaaagggaaacagcagctttgagattttcagaaggggtccatatcttttaacaccaccaacaacaaaaatgaatcgctggggtgggtggtcgggaaccatggcaaggtttggagtagagaaggaacaacatgacttcattggaaaggtcccctggggctggtgaggacaggatagagggagggtggtctgggcaggagaggacaggcctgggctgtgtgggacatggtggcacgacagggaagggagccatccagtggggtttagaagcaggacggatagctgggcgtggtggctcacacctgtaatcccagctcttagggaggcagaggcgggaggatagcttgagcccaggagtttgagacctgcctgggcgatatagcgagacaggatggataagccttggcgactgactcgttgtggagagtccagcacagggctggggtttgggacagctgcacgtggctggaggagatgggaggaaccagccctgactttggggaacagaagcctgctgtaacctttgtaataggaaacgaggctgtggctgcggggctggagacccaacctacctgtttccagcaaggagactgaagcctagccgggctgggcccaccccgattccagtcaccccatgccagtcacaggcagacagctgagcatgtagacctcctgcctccttcaagacaggcgggagctctcccagcgtgtaggtgtccctagtgaaggagcgtgtactattggcacatcctttgacaaaaatggtagcgcactgtacatattctgcaggttggcgtttacttctgtagtatgtcacgaacttgtattttgaaaatctcggcgtagtattccatgctgcagagtcccactcacgagacgttcctctgctgatgaatgcgtcgtggtctccgattgtttccctacagtttgatgcttttacctgtcatgggtagattgtggggagtgggtcgttggccctccacggcccccaaacagggcaggtgagagcatctggggcctgtgtcaggctgcacttgctcctgcagcccaagtgctcaggccaggcctcttgtttcctccccaggcccctgagcctctgagctccttgaagtccatggcggaacgggcagccatcagctctggcattgaggaccctgtgccaacgctgcacctgaccgagcgaggtgagggacccaggatggtggggaagcagcgggccaaagaggaggggctgcccctgacccatcctcaccactgagggggccggacccccaccctccccacagacatcatcctgagcagtacatcagcacctccggcctcagcccagccgcccctgcagctgtcagaggtgaacataccgctgtcgctgggtgtctgtccactgggccctgtgcccctcaccaaggagcagctctatcagcaggccatggaagaggccgcctggcaccacatgcctcacccctctgactctgagcgtattcggtgaggggccacagggaagggggatggtctgggacttgagtcttacggaggaggcagtggctgaacctgtgaggctgtgggtagagcaccaggcccctgacttgggctctccactgaaggtcagcaccgccctgggtctttctgtaccacctccccccgcagggatgcatgtctgagcacccttttgatcacgacaggactagtaggcagctggcactgaccttcctgttgctctcacaggcagtacctcccccggaacccctgtccgacgcccccctaccaccaccagatgccacccccacactcggacactgtggaattctaccagcgcctgtcgaccgagacactcttcttcatcttctactatctggaggtacagcagggcccccggggcagcctcgggccccccggcttcgccgccaccgccgccgtcccccctcgggctggaggggtgaggtgggtgccccactgcggccactgggaccgcaccccctccctattcccactcctgggcccctgccccaaatccacctgtccccgtccccgccttccagcccagagatgttagaactgcttgggttgacagcgaggctggtccactgaggcacacctcagccccgcttccagttgcccactggctcacccgcggcccctccccagccctgctccagcagccccagtctaggccgaccccactctgctcattggcacattctcaggcctccctggagaccactggggagctgtccagccccctcccaaccccagtgagtcatgagtgacctccaccctcatccccacttgggaaattttctaaattgcctcctctctcagctctcatcacacattagtttttcttccttctcaaagcttctctgaaagcaattttcacctcctgtctcattttccttctcctgatcagcattggtatgttctgtgcccccagccccatctccaagaggattgtccagcccaactgtggtctgtggcgggggccggggttcagccctgatgtcctgccccattcccctggctccccacccagtttgggggccccctgatccccctctccactgttcctcccccagggcactaaggcacagtatctggcagccaaggccctaaagaagcagtcatggcgattccacaccaagtacatgatgtggttccagaggcacgaggagcccaagaccatcactgacgagtttgagcaggtgagggccccgccccctctcttcccgctgctagggttggggtagagtccccaggctccaggcagcccctgctggcctctgctcccttgcctccacctttcagctggcgcagtccctcagcctgaccaagtactcctccctctggctgtctgctcagcctggaacaccgccctctcatcctccacttggccagctcctaggcctcctgtaggtctcagcccaaatgtcccttcctcaaagaaaccttcctggagccacccagcccagtgcctcccctttgcagtgctgggcacactcgcctggggtgtgggattttcccagtatgtgtccctgcaccaggctgtgggctctgctgccgagggaccttgatggcccccacttcacctccaggtcccagcactcagcagggcaggggctcagtgcggaaactattttttttgaatgggcttctcaagttctaatactgggaaattcctgctgcttgcaaacactctggaaccaacctacctgggtttcagcccagtccagctgggcgactctaggcaagtcactcgaacctctgtgtctcaattaacttatctgtaaaaatggggggaagaccacctacctaatgcagttgttatgaagattaaatgagttaataacatgtaagtacttaatggtgactgctacatagtcagtgtcatggattttttttttcaaattactttcagttggtgtgttctacagtgatgtttttttccaccaaatacttccctgatgccgagccccttcatggggatgaagtagtacaaggtccttgtcctcagagaactcagtcccctctcctggttctcccaggttgccatctttgaagcacttaagacattcatttagaacctaggtcctctcccattgtgtcctcagatgttaaccacagacttcctgtcctttcctggtttggcccaaaaccatcctccaagttagtacatttcagggcatccagtcattcagaaattcccacaccacttcgtcaccaataaaatgtccctgcagagtgcttggatttagactctgagactgttccattctctagaacaagggtgacagtacccactgcctcgaggtctttgtgaagattaaatgctaggctgtgcatcctgtactcacgtgagaggtgctcaaaagccacagccctcgaggaaacgaaggctgtgcactcacacctggggctggggccccgttctggcagctggcttcggtggaacctctgcggccccctccgtttcctcctcgctgaagtggcatgataacatttcctacccaagaagaaccttgtgaggatggatgagagtgtgtgcgtgcagggcagctggcccggtgcctgacacatccacagccctaagaattgtcccctttgtctgttggtccggcccagatcccagaccacctcctcgtccactcactgaccgccttctcccccggccagggcacctacatctactttgactacgagaagtggggccagcggaagaaggaaggcttcacctttgagtaccgctacctggaggaccgggacctccagtgacaccggcccctccctctacccacccccttcccccgcatgctgatccccctgcccaggtgagggccctgccctggaagactggagggaggccccaagccacggggcatccccctctcccaggaagcagggagggggccgggaggttttcctctcagccccaccctgggggcccgggggcgagggctgccccctcctcccctccccagtgagggacattttttggtaaacctattttcattttggaaaatatttatgaataaatagttttatatgacggctggcagcagcggcctctcctgtaccccctcaggagtcagtgagtaaggtgagggtcctgctggcgggggcgccgggccagctgggggttgaattgggagttgtaccgccgccgccggtcatccgtctcgtcttcttccggctgaccctcctgtagtgcccggccttggacccgggccagcagggcctctgcccgagacctctcagctgcttccctccgcagacgttcagctcgaagctggtccagggatggaggcctgtggggagaggagtgaggtcagaaagctggtagcccctaggaggccattcccccaacctctcccatagagggagctgccgcctggaagccccgctgcatccagcacaccccagcctcagctccttaggcctgctggaagcagccacttggtgctgggacgccatgggcacgtctctggccttcccttctgtgggctttggtcctccccagtctttaaaatctgatgcttctccaggtcaagaaagcacacttagcagccccctggccctcagtttccctttctagaggaaagaagactacaggcagtgtaccccctctagaccaggggtgcagcatcctggagacagaagcctgcttttactctctaacccagcagctctcaaactctttggtctcaggacccctttatactcttaaaaaccaaggaccccaagagcttttgtttaaatgggttctcttaatatgctgcaaatcattagtgaaaactaagaaagtttggacacaagcatctgccattggccatcagagtgagggtgtctccccatcacacagcctctggaaacctgcactacatgcctgagaacacgagtggaaaagtccaccagtgtcaggaaaataggcttgacaccacagcaccccgggaaagggtgtcaggacccctagggctccctggaccacatgctgagaaccacttctccacctagccagcccttcacggagtccctggctgtcctgaccagagacgctgcagtgcccatgctgggctgctgccaagccctgaaggtctgggccctggtctgccgaggtggggtcttcttactccttgggtcgctgcttctcagacccctccttttcctttctgctgcgactgccttcatcaccgccgtgctgtctcttcttccccagatgcttctgcatctcccgcagagggtccagacggctcttgatcttctcatctggggctgggccgggcggggggccccctcgccctgggggtagctggtaccaagggggttgagtctgtgcctccgctgcactctggcccaggtatgtcaggatgcccagagctttctcttgcctctcctgagggggccaggaaatacaagagatgtgatataatctttcaaggtgtcaggtgtgtctccctgacacaggtatctaagcgaacaggtatctaaggcttgttatgaaccagttggaccaggtgctggggatggaagacaaacagaggcaaagctccccctggggggacagtagcaggtacagtaacagcaggggaaggaggggacaagtggagccacttgagtgttcagaggcaggcatctttgcagagagacttgaagagaagcctgaagggatcaagcaaagcagaggagcgatgggtggggtcagcaagtccagagacagcagataaatgacaagagctgatgtacctcttttttttgagatggagtctcgctctgttgcccagactcgagtgcagtggcacgatctcggctcactgcaacctctgcttcccaggttcaagcaatcctcctacctcagccccccgagtagctgggattacaggcacacaccaccatgcccagctaatttttgtatttttagtagagacggggttttgccatgtttggccaggctggtcttgaacttctgacctcaggtgatccacccacgttggcctcccaaagtgctgggattacaggcgtgagccaccatgcacagccactgatgtaccttttacacttgatcttagccaaaaagcaagaggcgattgattcactttttgtttgattgttttgagatggggtctcgctctgtcacccaggctggagtgcagtggcgcaatctcggcttactgcagcttccacctcctgggtcaagcgattctcctgcttcagcctccctgggattacaggcgcgcaccaccatgcccggctaattttttttgtatttttagagataccatgttgaccaggctggtcttgaactcctgacctcaggtgatccacccgcctcagcctcccaaggtggtgggattacaggcgtgagccacagccggctgatttaaatttttaaaagcccatcaggtttgagactcctccagtttggagaactgagcggtttgcccagcagctggggacctctagcatctacctccaacccctgtgggcgcccagacggcaatagccaacgctttttgagtgtcatgccttggtatggtcctaaattctgtgtgttcactcttgtttgaccttggtcacaaccaatggctaaagtgccccctccctccaactcgattcatggcccctctgatgaagtgggtgaggccagcttactttctcctgtcgcttttcttccttgtactctttattgcctctgatcactcctttcccttcctccagcagctcccgaaacaggtccacagggccagaacctggggctcccgcctctgctgcttcaagctcaggcagtgagttctgatgtctggctttcttccgtaggaattctgtacgggcctggggagaaagttataggcaggacattcagaacctagaggtaattcaagaactgtgagtctggtgcccaccacagaaaatggcagtccagggtgctggggttatgagaaagggagcactaggcgcctaaaagaggcacctgtcctagctgggggtgagggtaggcagatgaggcaacgcctgggttttgtaaactccctttcaaatagtaaaccacgggtcatcaaggatgtatgggaggaggtccctggcctaaaccaaaggggttcctaacctcaagtgagacaattaaaacagccataaaggtatgcattaggccagacgatctgaattctagccatggctccaagtgactaccccaagtctgctgaagccctgtcccctgccttcaggacgcggatttcaaacagcgctcagcagcctactgagattctaaaaacctagactacctcccacccacggcggaggatcagactagctaaggaaatgaaagttgggtgtacaccaaacagatttaaagagccatacggaaagcccgtgtttgtgtgtatgtgtctagggggcggtgcacgaaagggctcgcccgatggcgtggagcctggctgtccgcctctccttaaaatgtgccttcccctcactgaagccatctcacttcgtgcaacagagatgacagtgcccctctaagaacgaacagtgcttattggggattccgcaagtcaggtgcacggcatgtagttagcatacagtagatgctcaataaataggctgtgcaggcaaactaaaaagtgatccgaatttccttgaactgtccaagggttcacggattcattaaatgttaagcttctcttttgtgctagacactgttccagccatgtgaaatacatcagtgggggaaaaactaagacgagggcgagatcaaggaaggtttcgtggaagtgggcacaaggtttgcggggcaacgtcctcgaaagtgggatcggcgcctggtcccgaatttcacacggggcacattgagcctgcgcaacgcctccgcttccggcccccaaccgcggcgcctgcgcgctgggccccggagcgccgccctgccggcttccgagcttacctcttgctgagccagcagcaccctccgctcacgctccttctcctcctcccgggcctgggcctcgtcacgccgcacgcgggcgacattgtccttgttccggacgtgccagctcttcttgggcaagatattcatggcgtcgtagctgtccagggactggcacgcccgcctctttgcacttccgattggcgagaggatgcccccctttttcttgtccctacttcgaccgcggattggttccgaattagttggtacggccccctggcctgtagcgacaggtgattggctgagacgccctttatcacagcgaatgctaggcgttcggctcgtggtatcccctagcaaccgcctcttgtcacagatctgaaccaatcataagttggcccgcccctgatgctaccagatgcggccgtcgattggccgacatgaccgacaagtctccttgcggaagagcgctctgcaccgacaaacatgcccgtacatttgattggctcctgccccgctgtagccctgcccccaccttcaggacgcagatttcaaagcgcgctcagcaacctcggctgtatttattgatacaaggaagatcacccgagagtcagggacgtggcggcgaggggccctggaaatctccagataccaaagctggaagggcgtggagtcttctccagttctcctagtttacagatgttgtgacctaggcttacaatgggcctggggtctgaaagcgggacgtgggctgcgggggtcaaagagccggtttggtggaggtcagcgccacagcgcgccgtgccaggaagactttattctgcgcctcctggggcaaagagaggtggaggtgagacaatcctcttccccaacccctttccatgttccccaggggccctctcagggacccgcctggctcaccgtctctctctgacgtttgagctcagagatgaggcgtccgtaggagttagccagagccacagtgtacgccatcaggatgctgaaggagacaggaacggaagccactcctgacacgctcttccattatatccaaacgtctggctccttcgaagccagggatgtggacgcctaagcccctcctcgtctgggctcaaggagttcagtctcccagcccctccgccttcagatccaggagtcctacgtcccgcccacctcctccttcggacccagcagtccaggagcctaggcctcctccctcagactcagtacgttgcctgctcccacgcccaagcctctcctctcttggacgcaggtggtggcccccagatcacacgcattcaaacccagacccagaagtctgggccgtctcacctggagatcagcagaaggggcacagcaaaagcctgggtccccaggaagaagaggaaattctgggtggtctcagggaggctggaaatagactcagggatctgggcccagatggacgactgcccccggaatggaccacacagcttagaaggcgggatcctgaagtcaagacaggctgggctcacatagtgccaggagtctgaacactgaatggggagagagggagggagagaggcgggagcctctcgcacttacaggaagatgctgtaaagcaggggaacgctggagatggccagacccaggagaaggaccaaggggaaaaagaaattcgccgcggaggcccggaaggtgcgggcagccggggagcaggtggagaagagggtaagctggtgggggaaggcacggagaaaagggctctgaaacacaagagtctgtgcctccatttttttttttttttttttttgagacagagtctcgctctgtcgcccaggcttttttttttgagacagagtctcgctctgtcgcccaggctggagtgcagtggctctcactgcagcctcccctcccgggttcaagctattctcgtgtctcagcctcccgagtagctgggattacaggtgtgcaccaccactcccggctaatttgttttgctgttgttgttgtttgtttgttttctctttttgagacggagtctcgctctgtcgcccaggctggagtgcagtggcacgatcttggctcacttcgaccttcacctccctggttcaagcaattcccctgcctcagcctcctgagtagctgggattacaggcgcctgccactaagcccggctaattttttttgtatttttagtagagacggggttttgccatgttagccaggctggtctcaaactcctgacctcaggtgatccacccgccttagtctcccgaagtgctgggattacaggcgtgagccactgcacccggcctacctgcctctccttttttccgaaccaggagtctgagccccttcctcatctaggaccccggagtctgagtccccagatcctcagacatataagtcagaatgccctagacccctcctctcagatgcagtagtctgtcctccaaccccctcctctctcaggaccgagtaatccaggcccccaggatcttccttgcccttgacccaggagtgcgggccccaatacctcctgcctcagacccaagggtcccccctaccccttaccttcttcaggtagaaaagcagcaggaacttgaccgtgttaagcaggggcagtaaagggcagaaaaaactccccacccagaccaccgtctgcgcgtagatgagccccagcacctcgtcgggcacctggaactcttgggtccccgccagacgacccagcgccccaggacagaggccacagaggagcctgaaggacggggcggggccgggccggagtcaggggagtggcggcctggagtttccacgcctccaccgccccgcccgccaataggaagcatgcgtattggtggtggggggggggggggcgggactttcaggactccacgtggagggggtgtgtccagagggcgggtcctgaggactagaagggacccagatgtcgccgccgtcggggccagagggaagtaacccactaaaacaagggcggggagcggggagatctgcggacctagggcaagcaaagggagcaggcagaggcgggaatggtaaaaaggtgcgcggtgaaaagaacagcgcgatggggcacggcctcgtcctagaggggcggggccacagcaaggggcggggctctcactttctaggaaactggatgagcagcgcgactgccaagacagtcagcagatcaaagagcagaagtttgtacatttcctggcccaggacagtctcccagcactgaagaaggaagaaatatatcagaaagaactcgggacccgggcacctggaggcccacgcgtccgagtctccacatcgcaagcctatgagaccctgtcaatactttctctgggggtcctcgtttttcaaactttcatacccttgggagagtgttccagcaccccaagctcccctctccgcccaaaccaagagtctggacccacccagctccatctttccttcagggacccaagagtcccacgcacacccatgccgttctcaccggaagttgtttgtaattgtagccacaggttttgcagtcctcagcctcggagtcgcccccacaagtgatctgattccagagagagaagagcaggaccaccagggaggcgaggcgaagaaacacggtcctgaaggggggaaggcagagaatgggccctgacccggtacccaccatgtggcagttcccttctcagtggaacgcgcccgcattcaacccatctcacagatgaagctgaggcccagtgacagaatcaggatttctttctttctttctttcttttttttttttttttttttgagacagggtctcactctgtcacccggactggagtgcagtggcgcgatctcagctcactgcaacctccacctcccaggctcgagccattctcctgcctcagcctcccgagtagctgggactacagaagccactaccgccgggctaatattcgtatttttactacagacggggtttcatcatgtttgtcaggctggtctcgaactcctgacctcagcctcggcctcccaaagtgctgggattacaggtgtgagccactgcacctggccaacagagtcaggatttgaatccctggattcggtatcagcaggatttccgtgtcttacctgtcagcgccaacatccctctgaccgcccccacccttcatcattcccagccatccccgtgaggctggaacctgagcaggataaaaacgatctggcgactccgagtgtagccctccagtggagcaatgagcttgaacacgggcggcagcacaaaattgaccccagcgatgaagatggacggaaggtaattcaccccaagcttcagcagtggcaactcctggacaaggggcatctcctgggagcgggatggaccatgagtagaggcttggggtcctggaggagccaagcttaaggtcctccccccggcctcttcttcttcttcttctttttttttttttttgagacagagtctcgctctgttacccagcctagaatgcagcggtgcgatctcggctcgctgcaacctctgcctcccgggttcaagtgattctcctgcctcagcctcctgagtagctgggattacaggcgcccaccaccacgcccgtctaatttttgtatttttagtagagactgtttttcaccatgttggtcaggctggtctggaactcctgacatcgtgatccgcccgcctcagcctcccaaagtgctgggattacaggtgtaagccaccgcgcccagcctctctttttcctttaaaatccctaagtccagggtccgaacataccctctcccatacttcctctctaagatctctggcatcccaaacttccgtcccctccctccaccgttggaaatgtaggttccaggaccccctggcttcctcttccaagaccgtccgcacctgcagctccacggtgcaccccgtagcccagtagacgccatagaaggctgcccccaggagcgcgaccaccagcaggttgagcagcacccgcaccaaccaaaccctggcttgctggcccagcgtccgcaccgcagcctggcgccgcaccactgtctcctccagctccacctgaaggcaggagagatgcccgcttggactccatttcccaaggcgcgggcctcccggttccccaggtctggctctccagagatcctccttaacgtgaactgatgcagccgtctccccacccgctaacaacctctgcagtcctggttccacctgctccaggaaaccagcggccctttacagccccgccccttcgcggccggatccagcaacccaagcccccatccctccgcggtcaatctcagcaccccaggccccgcccctgaggctccgcccagcatcccaagacccgcccctggtcagccctgcccatcagaggctccgcccccaggtggccctgcgctttattcctggcctgaagttccagttcagctgtatcaagacgccctgctggccgctcccatcacttaactttgaaccaaattgccttaggccccgcccgcttcttgtgcttacttaaaaaaaaacaaactttttttttttttttttggtagagagggagcctccctatgttgcccaggctggtctcgaactcctagactgaagcgatccacctgtctcggtctcccaaagtgctggggttacaagcattagccaccgatcccagccctggcgcatccttttcctacacgcttggagctcgggcagccctatctcggcctcctctcaaccttctcattccccaggacctgcctttcttggagaaggagctgcttagcatctctccggaggccccatcaccgagttaggccctgtgcgttatctcagcccggtcctgtctggtccctacccagttgcagaccccgctccctaatcgcacctttaattcgtacaagatgatgcgctggcgcagccgcacgtggacgtccccgcagagaccgaagtcccaggccgagaacacccggtggctgtagctggtcagagcctcggactccgccagcagtgtctgcttcagcccagacaccgagctgagaggggagacccgggagacgggaagtgaaaggacagccaggaacgggggttatggggagacccctcatattgggacaaatggggaagatgaaccctaaggccttgggtactaggcgagttcccaccagaccagatggggaaagagtcaaagaggcggagacacagtcattgaaggcaaagtccaagggagattcagagacagttctggggtgcaggcaccccaaagagaggcagaaacctaggagacagggacagagcctcggagcgaagggggcagaaacccagagtgagagaaacagaggccctgaggaagacagagatgtggaggagggacagaggccccagagggagattcggagaaagggagaaaaagacagtgagaaaggggaaactacatctacaaaagatgggggtcaaagacccataagaagtacaggcacacagagaagggagctgcggcgggaagagccgagaagaagacagagacccagagaagatggcaggtaaagactcaagagagggggcaggccaggcgccatggctcacgcctgtaatcccagcactttgggaggccgaggggggaggatcacctgaggtcaggagtttgagaccagcctggccaatgtggtgaaaccccgtctctactaaaaatacaaaaattagccaggcgtggtggtgcatgcctgtaatcccaactacttgggaggctgaggtgggaggatcacttgaacccaggaggtggaggtcgcctccaaaaaaaaaaaaaaaaaaaaaaagacccagagaagacgggcaggtaaagagactcaagagaggggggcaaagacccaggaaggagatagagaaccccagcaggggcagaaacagaactggacaaagagaccatgtgcaccttcactgccctggccccggcccccatcatctctcatgtgaacaaccacagagggccctcacatggtctccttgcttccacttgtgcccgcatataatccattctcagttcttgagccagtgggaccttcttttgatgcaactcagaccgtattcccctgtttaagacctattccagggcttttcccttctcttaaaatcgaggctctttgccgggcgtggtggctcacgcctgtaatcccagcactttgggagaccgaggcgggtgcatcacctgaggtcaggagttcgagaccagcctgacaaacatggtgaaaccccatttctactaaaaatacaaaattagccgggcatggtggcacatgcctgtaatcccagctacttgggaggttgaggcaggaaaattgcttgaacccgggcggcggaggttgcagtgagctgagatcgcactactgcactctagcctgggtgacagagcgagactccgtctcaaaaaaaaaaaaaagttgacttttggccaggcacattggctcatgcctgtaattccagcaccttgggaggctgaggtgagcagatctcttgagcctaggagtttgagcgcagcctgggcaacatagcaagaccctgtctctataacattaaaaaaaaatttttagcaagacatggtggtgcacccctgtggtcccagctgctcccgaggctgaggtaggcggatcagttgagttccggaggcccaggcttccggtgagctatgattgcaccactgcacgctagccgggtgacagagtgagaccctgtctcaaaaaacaaaacagactgggtgcggtggctcacacctgtaatcccagcactttgggaggccgaggcaggtggatcacctgagatcaggagttcgagaccagcctggccaacatggcgataccccgtctctactaaaaatacaaaaaattagctgggcgtggtggccggagcctgtaaacccagctacttgggagggtgaggcagtagaatcgcttgaacccgggaggtggaggttgcagtgagccaagatcgtgccattgcactccagcctgggcgacagagtaagactctgtctcaaaaacaaacaaacaaaacaaatgaaaaacaaaaacaaatcccaaaaccttgatcttttttttttttttagatggagtttctctctgtcgcccaggctggagtgcagtggcgcaaactcggctcactgcaagctccacctcctgggccaccgctcctggcccaaaaccttgattttaactcacacagaataaagggttacacagcaagaccgaggattctggggccgggcgcggtggctcacgcctgtaatcccagcactgtgggaggccgaggcgggtggatcacgaggtcagcagttcaagaccagcctgaccaacatggtgaaaccccatctctactaaaaatacaaaaaagttagctgggcgtggtggcgggcgcctgtaatcccagcaacttgggaggctgaggcaggagaatcgcttgaaaccggaaggcggaggttgcagtgagccgagattgcgccactacactctagcctgggcaataagagcaaaactccgtctcaaaaaaaaaaagactgaggattcttggggagggggtttctgccaccaccacttgcttccccaccccaacccgtcccgtcaggggtcaggggtgcaggtgccactgaccgatgcaggatgagcaggaggcagatgaggccaacggcaaaggcccagcacaggtaggtgaccgccaggcgtgggcggggcgggtagaagccatagaagagaggggaccattccaggtaaccctgtggggggaaggcggcgcaggggccactgtgggaggaggcggggctcctggagctgcacagtcagggtctggggtcagggtttgaggttcgtgtcattgaaggcactggggtcacaggtgggcggggaatcccccagggacccaggcacctacctcacccgagagcaagttgaagagctgggtggcaaaggtgaccaggccctgggagtgggggttataggagccgcagggcgaggagatgtcggggccgggagggcctgggggagcgcctcccaaccaggtgggcagcagcgtcatgcaggccatgagcacagaggccagcacgttaagaaggagcaggaagcgcagcagggagaagtaggactccgtgccggcgccaaactggcctgcagggggcagcagagagaggctcaggttccttcccgggagcaggaccagcccctcctacccctggactggggtccagccgcgccttcctttctttctttcttttcttttctttcttttcttttcttttcttttcttttcttttcttttcttttcttttcttttcttttcttttcttttcttttcttttcttttcttttcttttctttctttcctttctttcttctttctttccttccttccttccttccttccttccttccttccttccttccttccttccttcttctttctctctctctctctctctctctatatatatatatatatttttttttttttcttttcttttcttttcttttttttttttgagacggagtttcgctctgccgcccagcatggagtgcagtggcgcgatctcggctcactgcaacctccgcctcctgggttcaagcaattctcctgtctcagcctcacgagtagctgggattacaggcgtgcgccaccatgctcagctagtttttgtatttttggtagagacgggggtttcaccatgttggtcaggctggtctcgaattcttgacctcaggtgatccacccacctcggcctcccaaactgttgggattacaggcgtgagccaccgcgccaggcccagccgtgcctttctcagacccaagagtccagacccccagcccctcctccctcagacccaaaaatccaggcccaagcccctcctccctcaaacccaggagtccgtccccagcccctcctccctcagacccaggagtccaggccctgcccccaggacaccacccaaaccccaccgcacccccgatcctcttcagtgtccacgcccagggctgcaggcttcgcaagccttcctttgttttctccttggacctccgaagtagccgcgcccatcggtccgtcttagttccagagccatagaccacctggtccctgctggcatttctttgcctgggagggaaacaggcagaaaatgaggggtttcgcagccccagactgggaaccatctgaatgtagacacaatccaacagtagaatggagaagtaaattgtggcctatacataagatagaatactctgtagcaataaaaaagaaaccagctgggtacagtggctcaggcctgtaatcccagcactttgggaggccgaggtgggtgaatcacctgaggtcaggagttcgagaccagcctgaccaacatggtgaaatcctgtctctactaaaaataccaaaaaaaaaaaaaaattagctgggcctggtggcgggtgcctgtaatcccagctacacgagaggctgaggcaggaaaattgcttgaacctgggaggtggaggttgcagtgagctgagatggcgccattgcattccagcctgggtgacggagtgagattccaagaaaggaaagaaagaaagaaaagaaagaaacctaatgctaggcagaagaagccagcacaaaagactgaagactgtatgattctatttgcacaacgttgcagagcacagcttgcaaagctctacagaaaagcaggaggctggagtgggaggatcgcttgagcccaggtgtcggaggctgcagtgagctgagactgcaccactgcactccagcctgggcatcagagcaagactctgtcaaaaaaaaaaaaaaaaaggttagggagaagaggttaccttgtatttgtgaggaaaaagggggtgtcaggggagggacgcacagggtgctgtcatgccgtgtcacttgccctagctggagtttatctgggctctcactttatgaatacagccatccctcagtatccatgggggttggttcaaggactccccaagaatactgaaatctgtagatgcccaaattccttatataaaacggtatagtatttgcatacaggctacacacatcctcctgtgtttgttttattttattttattttaatttttatctgatttttacagacaaatgtctcgttttgttgtccaggctggagtgcggtggtgcaatcatagctcaatgcagcctcaaacttccaggctcaagcaattctcccgcctcagcctcccaaagcgctggggctacaggtatgggccacgacacccagccctccaatgcactttaaatcacctctagattacttataacacccggtacaaggtaaatgttatatagatagctgttcttttaacttgtattattttttgtcatattgttactttgattattacttttaaaaaatagagatgggggtctcgctatgttactcaggccgcagtatagtggctatattcacaggcatgatcccactactgatcggtgtgggagtgttgatacattgttattttttattgttttttccatatatatacacatatatatacatatatatgtgtatatatatacacacatatgcatatatatacgcatatatatttgagatggagtcccgctctatcacccaggccggagtccaatggcacgatcttggctcactgcaacctctatctccctggttcaagcgattctcctgcttcagcctcccgagtagctgggattacaggcacccgccaccacacccagctaatgtttgtatttttagtagagttggggttttgccatgttggccaggctggtctcgaactcctgaccacaggtgatccactcgcctgggcctcccaaagtgctgggattacaggtgtgagccactgcaatgggcccataatcatttttgaaggagggcacctgcattttcattgttcaccaggccctgcaaattatgcagtgagaatgggaaaagaaagaagttaaagagagggaggcttggaagaggaggcaaagatgaaggaaggtataaagcagagagaaataaatattaacagattttggacacacacacagagagaaactgaggcagagacaggattggtggagaccagggagacggcaaatcccagagagaagagaccccagagccatcgaaaggcagcactcacctggagtccgaagtagagacaaagatgaggggaagaaagaaaccaagagaggcagctctgagcggggcagagagaggccccagaagccaggagcggcagaggacagagggaggagaccgagtccagggtatgggagaagggcccggtccgggctgtgcgggtcccagctggaggtggggcctcacctgtgtgcccgtctggcctgcatgggccagggcagttcccgggaagggtgagggtcctgcagctctgtctgggtgacttctgtgaaggcctttctgctccttcctccatcctcctcctcctcctccagcgccccccaaggcagcaccccagggtctcggtaccgaagggtggcagcactgggcagctcgttcagcacagaagacagcgatgggcctggggaggagcagggggctgggaagacccgggagtctgggccctaattcctcctccctcagaccaggaaaccaggtccccggcccctcctccctcagacccaggagtccaggcccccggctcctcctccctcagacccaggagtccaggcccccggctcctcctccctcagacccaggagtccaggcccccggctcctcctccctcagacccaggagtccaggcccccggctcctcctccctcagacccaggagtccaggcccccggctcctcctccctcagacccaggagtccaggcccccggctcctcctccctcagacccaggagaacaggcccccggcgcctcctccctcagacccaggagtccaggcccccggctcctcctccctcagacccaggagaacaggcccccggcccctcctccctcagacccaggagtccaggcccccggctcctcctccctcagacataggaatccaggcacccagcccctcctccctcagaccaggaaaccaggttcccagcccctcctccctcaggcccaggagtccgggtgccagcctctacttcccctggacccaggggtccacagccctcaactccatccccaagcgtggaaccctcctactccagggcagtggagtccaggctttaacttccttttccctctagctcaggagtgtgggaacccagcctctcctattcccaagacacccaaactcccagcccttagccctcccctcctcccagactagcctggttctccaggctcctcctcctcagaccctggagttccagcctccagttcccttctcccccataatatcaggaagtggaaccttctctctttagccctcagactcaggaggccaggcctcccctttcctcctccagcaggactcccacctagcctgaaggtcggatggatctgagcttctcctggcattccctacctcctctggcctcccggggggccagccactccctagaggagccccaggcttctgattccaaggtcgggttttcttccatggccccaggctgggctgtctctagtggccaccaggcagacactgccccaggtaagggaggggccaggggcaggtgtgtacctggccagcaggtggcccggagggagtaaggtacacttcctgtggtttctcagggccgctgatgcgaaaggtctcctgggagctgaagtccccgtggtgccccgggcctcacagtttggttcctgggctgggcgggggggctgtacctcaccctgggacttggtggactaagtccttcccaccgtttatcacccagatacctgcacggacacgatgcctttgtgcaacactttattgggaaagatttacacacggtgacctgtcataggccaagcgatgagaagagggcgccaggagtgctggggtcccgaggtggctcagatggaagccatgggacggccgtccccaggcccgcgcacccgcacctcagtttcccctttgtgaaatgggaagcttatgcttccttccaagtctgcaatattggtgcgatgagctaaaagtggagcgaaagacacaaggaagaggcttcccactcccaggacctgcccccaagctccgaccccacattgtggatgcaaagaaagggaatttgcccaaaacccactgcccaggggccccttccgttttggggaagtgcagtgctctctggatacccagaagctggagcaggggccagtgactcttgtctggacaatactttgattttgtaggagtggaggtggcctctgggcagagggcagggaggacacccccgggtctgcttcagttgcaggcagggtatttagctggggaagaggaaattctctccaggaccctctccaaggtaaggactctttctggggaggagacagcagcctggttcacagaattcccgggaccagctggcagagggagcgtcgtgacagcttactcctcccggagcttctccggggcaaggctggtgggctgggatgctgccttccgccggctggggctgcccccacctaaagccagccccagccccagggctgccagggccaggaagtggatacagaagtagatggaggcccagtaccgaagggtgtcggccaaggagagcagcacgaagcccatgcacatgtagtcataggcgcgcatcttcaggaaccagtgcacccagtcccaggccttctggccccctgggctcagccgcccccgcagggctgactccagccggccctcggcagccaggcacagcgggatggtcaggaagctcaggtagtagcccgggtggaggccgtgccagtaggcgctcagcagcatggtccaggcgctcctgaggaggaggctgggagtcaggacctacgagtccaggtccccagtgcccactgcccccagatccaggagtccaggaccccagcccctcctccctcagaccgagaagtgcaggcccagcccctcctccctcagacccaggagtccagaccccaccccttcctccctcagacccaggagatcaggccccagtccctcctccctcagacccaggagaccagaccccacctccctcctccctcagatccaggagtccagaccccacttccctcctccctcagatccaggagaccagaccccacctccctcctccctcagatccaggagaccaggccccaggccctccccactcagacccatgaccctagctccggaaggcggaggaggctacaggcctctgtctccttcagggatccaggagctcgcagccttccatacacactcagtcctatcaagaccctcttcttctttaaagatttaacattttatattccactgcccttcctctcccaggaccaacaagtcttaattcttcagcccagtggttttttttttttttttttgagacagagtctcgctctgtcgcccaggctagagtgcagtggcgcgatcttggctcactgcaagctccgcctcccaggttcacgccattctcctgcctcagcctcccgagtagctgggactacaggcgcctgccaccacgcccggctaattttcttttctatttttagtagagacggggtttcaccgtgttagccaggatggtctcgatctcctgacctcgtgatctgcccgccttggcctcccaaagtgctgggatcacaggtgtcagacaccacacccgggcagcccggtggttcttaacctggggtcccaggtctggcatcagcatcacctgagaacttgtgagacatacaaatccttgtccccaccccttttgcaccagaagccctgggggtggggcccaggagaagtcttccaagttaacaagtcctccagtgactctgatgcctgttaacatttgacaactcctgcctggctcatgaagatccagaagtccctggcctgtggtccttccttattctgggcccaggagatatgttcctcttcctccaaggcccagcaccatctttcctcactctttttatttttttggagacagagtctcgctctgttgccacacgacaaggctcactgcagcctctgcctcttggattcaagcgattcttatgcctcagcctcccaagtagctgggattacaggcaagcgccaccaaactcagctaatttctgtattttttgttgttgttgttcagacggagtctcgctctgccgcccatgctggagtgcagtggtgcaatctcggctcactgcaacctctgcctcctgggttcaagtgattctcctgcctcagcctcccgagcagctgggactacaggtgcccaccaccatgccaggctaatttttgtatttctggtaaagacggggtttcaccatgttggccaggatgctctcaatctcttgaccttgtgatccacccgccgtggcctaccaaagtgctgggattacaggcgtgagccactgcacccagccatttttgtatttttagtagagatggggtttcaccacgttggccaggatggtctcgatctcctgaccttgtgatccacccaccttggcctcccaaagtgctgggattacaggtctgagccaccgcgcccagcctctttttttttctttgtaaagatggagtcttgctatgttgacctggctggtctcgaactcctgagcttaagtgatcctctcaccttggcctcccaaaatactggaattacagatgtcagccattgcacctggccaactcttgttttcttgagaagggaggaccattggctttctggttcttcaagagtgcggaggctgggtgcaatggctggcacctgtaatcccagcactttgggaggctaaaaatacaaagattagtctgtcatggtagcacgtgcctataatcccagctactaggggggctgagacaggaggattgcttgaacctgggagggagaggttgcagtgagccgagatcacgccactgcacttgagctgtaaaataaacaaaaacgatggatcctgtgcattttaaggtgtttaggagcatccctggcccccacccacgacatccgactagcaccttccagttacaacaacatgtctccagggattgccatgtgtctcctgggggtgcagcagcagcacagttgcccccagttgagaagcacttgtctaaacactggggtgctttgacctggcctcagccccagagctttaagcgtcatctatacctggccagatgcagtggctcatgcttgtaatctcagcactttgggaggctgagatgggaggactgcttggggccaggagtttgagaccagcctggtcaacacagtgagacctcatctctatacattttttaaaaagtaaaaaaaaaataataataatacttaaaaaattttggccgggcatggtgactcacgcctgtaatcccagcacgttgggaggccgaggcacgcggatcacttgaggccaagagttcgagaccagcctggccaacatggtgaaaccctgcgtctactcttggcacgagaatcacttgaacccaggagatggaggttgcagtgagctgagatcacaacactgcactccatcctgggtgacagagcatcaaaatactaatactaatactaatactaatactaataataatatccttcttactcccaaaacttactcttcctgggtcttccccttccacatttatctaattaaattaaattaaattaataattatttttgtttgttttttgtgtttttttgtttgtttgtttttgagacagagtctcgctctgttgcccaggctggagtgcagtggcgcgatctcggctcactgcaagctccgtctcccgggttcacaccattctcctgcctcagcctccccagtagctgggactacatgcacccgccgccacacccggctaattttttgtatttttagtagagacagggtttcaccgtgttagccaggatggtcttgatctcctgaccttgtgacccacccaccttggcctcccaaattgctgggattataggcatgagccaccgtgcccggcctattttattttattttgagacaaagtctctctctgttgcccaggtgaccttggctcaccgcaacctccgcctcccgggttcaagtgattctcttgcctcagcctccctagtagctgggattataggcgcccgccaccatgcctagctaattttttgtatttttagtagagaaggggtttctccatattgcccaggctggtcttcaccatattgccctgacctcaagatgatccacctgcctgggcctcccaaactgctgggattacaagtgtgagccaccatgcctggctatgagttctacttctgttttttttttttttttttttttttttttttgagacggagtctcgctgtcgcccaggctggagtgcagtggcgagatcccagctccctgcaacctctgcctcccgggttcaagccattctcctgcctcagcctcccgagtagctgggactacaggcgcccaccaccacaccagggtaattttttgtatttttagtagagacagcatgtcaccatgttggtcaggctggtctcgaactcctgacctcatgatccacctgcttgggcctcccaaagtgctgggattccaggcgtgagctgccgcacccggctgagtttctgcttctaaaggctgcacagataacagtgtcaagcacagagtctccactcgagaaatattggaagaatgaaaaacaataaaaatgaatacacagcacgcacttacctgtcaggcctcacattaaatacatttcacattttatcacatttagtccttctatctacctatgaaaccagtaataaatagcattcactccattcaacacttgaggcaactaagaggtcaactaactcctcaaggtttctccataacctggacggccaagattccaggaaggctggctattgagtccacaggactcagtacattgcttctgctgagtgaggctgactttacagaagtagcaactgaggccccgagagggggaacgattttacaccggcatgctgccactataattagaggcagggcaaaaccaggctaaacaaactacaattcccatgagcctccgggggcaggggcccagccagggacgctgcaggctaccctggggcctgctgggagatgtagttctgcagtgtcacctgagactgggcgggctcactcaccgcaggacataggaacgggcaggtgcgctcttgtagatatactgcgccagccaccactgcaccgtcatgttccagtaccgcatgccatcgcgcacccgcacgcagaaatctgtgctgtagcagtcgatgttgcggatggtctcatagtcatactccaaggaagccgccttctccggactggggggtggaggatgagggtgggggacagacatgcagctcagccaggccccctcccgacgcctgctagtgtcccagccccggatgctaaggaagggatcctggccaggcaatggccctctggctgtcagacttgctagggcagcaagggagggtggcccagagggtgcctgtagggtaggaaggtgggtgggctgggtggtacagtccactgacaatggggttcttcttcttttggtacctaatggggcccgccacagccatgaaaagccttgaagggctatggttgctaagctatgagtcctttagcaaccaagctcagtatattcagagaagccgccaaggatggtcccttctaaattgtcggacactgcagttgccagggaagttgtggttatcatccctaataacaaggtgcttcacggttgctagggagatgttccaggcgccagtggggtccccatgatctttgttgctaaggaaaaggcattccttagcaacaatgcctaggatgtttagaaaggcttttaggaaggggcttttttcctggtcgcagtgattattggagaagtgtcacctctagcaatacagtggctccctcatcactcatgtcgacagccccagcagtgggaaacactggcccatatgaagccttggtggcctctgatgacaggaggggagccatcctttaggagtgaggaccgagcagatttagaaaaaccttcaattcctgcttggctttactagggggacatcctctctctagcagctggaggtcagggcacggttattagggcagtggtaacaaattcccgtgggggtgtcactacccccacaacagaatggcagtttgtgacgactaggggacaaccctagcagggagtagtagttcatcatttacatcaacaggctgttcccccagccgcagtccaagcccctgggggaaggctgactgcagctgtcaggaacacaagggcagtctactcctggttgccgggggtgccatctccctagcaacacgggggcaatacttcctcagccacaagagagtccacagctatggccgtgcgacttgcctagcaatgcaggtgccggggggtggagcctctctggcaacaagggtcaacccatagtttccagggggaggtttggcttccttagcaacagtgtaactgtagttggtaggaatggcgtgccctctgctggggaacagcactggtcagggattggaaattgctatttccttgcagagggctgctgagggctgctatgtgaggacatcccacggggtggagcagtgctagctcctagcaacaaaggggcagtgcagggagtgccgtatctgcagcaacagagcaaaacttctggtaaaaaggaggtgagctactgttgctagggatcctgcttccctagcaaatagtggcgttctgttgctagggaaccgtttccctagcaacagagggtgacccaccactagcaaaggatggcatccccagcaagcaggaacaatctggttctggggggtgacacttctgtggcaacagaggggtggcacagggttgctaagttaccaccttttcctagcgacagggggcagttcaccacactgcggggtgacaagcgctagcaacaaggggcatctgtcagtaccagggatcttttccctaccgacaggggctggcaggccatggttgccgagggggcgacactctgctcaaaaaggtggtggccctggccccttgctccccgctctcctcccggctaggggcagagccagcccttggaggtgggggctgctgggtcttgggaagcctccctcgcgccgcctgacctgctggggggtgggcattggagggtggggccgcctccggcccgggctttggcggccacggggtaggccccaaagccggcggcaatgcagccgcactcggcggcaatccaggccacgtagaagcgcatgcggaaggcgaagaagacggggatcatgtagaagaggcgggcgggcagcgggcgggcgtagaaggcgtcctcgcgcacggcctccagcgggaagaggtgagaggagagcaggaacagcaggccgaagagcggggccggccaggcgcggcgcagcaggggccgcaggctgggcactgccccggggaagggctgctccagccagtccaggtaggtgcggtagcggaagaacgggcctgtggggcggggagggagggccgcggtcagacaggcaggtgggcagagctcaagtctgcaggaggaggacagggagcttggaaggaaggtgggaagagggagtgagaggggcagagactgggcgccggggagaccccaagggtagggactgagaccctgagagatggggataaggaacgagagacaggggggacaagaaactcagagagacagagacagtaacagaaaaacagacagaggggccggtgcggtggctcacacctggaatcccagcactttgggaggcctagctgggaggactgcttgagcccaacagttggacagcagcctgggcaaaacggcaagaccccatcactacaaaaaataaaaatcagccaggtgtggagggcacctgaattcccagctactggggaggctgaggcgggaggatcgtttgagcccaggctgcagtgagcagtgactgagctactgcattccagccagggagggagggagggagggagggaaggagtgaagaagggaagaaagaagggagggaaggagggaaggaaggagggagggaaggagggaaggaagaagggagggaaggagggaaggaaggagggagggagggaaggagggaaggaaggagggagggaaggagggaaggaaggagggagggagggaaggagggaaggaaggagggagggaaggagggaaggaaggagggagggagggaaggagggaaggaaggagggagggagggaaggagggaaggaaggagggagggagggaaggagggaaggagggagggagggagggaaggagggaaggaaggagggagggaaggagggaaggaaggagggagggaaggaaggagggagggagggaaggagggaaggaaggagggagggaaggaaggagggaaggaaggaagaagggaaaagggaaggacggagggaaggaggaaggaaagaaactaggagatagctgtggcactttagctacaatatgatggtggtctggcctagggaggaagcagtgtgattcacagaagggaccggggttaaaatttttatatgttcacaaaggccgtatgtttaggtcaatgtagcatgggaagataaaaggaaaaaaaaaacaaattaaaataaataaataagaccacatgttgtatgattccatttgtaagcgcaatgtccagaacaggcaaatctttacagatagaaagtcaattactggttaccagggatggatggaggtttgtgggatgatggacatggggtttctttgcagggtatgaaactgttctgaatataactacacagtggtcatgtctgcacaactcggtgaatatactaaaaatcagggagttgtatgttttgtgttttgttttttttcaggaaattaaagaagccaagagttgtatgttttaagtggatgagtatgtgaattagagttccctaaagctgttattggaaaaaaaacctttgatgaggtaaacattaatgaaaaatattttctttttaaaatttcacatatatatacacatacacacatacatatatatacacacatgcacacacacatacatatgtattttttgagatggagtcttgctctgttgcccaggatggagtgcagtggtgtgatcttggctcactgcaaactccgtctcgtgggttcaagcgattctccagtttcagcctcccaagtagctgggattacaggcacacaccaccatgcccggctaatttttgtattttcagtagagacggggtttcaccatgttggccaggctggtctcaaactcctgacctcaggtgatctgcctgtctcagcctcccaaagtgctgggattacaggcgtgagccactgcgcccggccctttaattttatatttatttattttttaaaaataaaggtttaaaataaagggacgggatcttgctatgttggccaagttgatcttgaacttttggcctcaagcaatcctctcgcctcagcctccgaaagtgctaggattataggcataagcccccacgcccagatgaaaaatatttccttaagctgaaagtggaccctaagccgtgaatatttgttgtctgggaagcaaaaacatcaggttgacatagatctttacctcctttatctcttctctttgctcccaatacgctacaaggagaagagcaaggaattgcttaggttgagacagccagcttctaccccaaagcagctctggtccagcggaggtgtgagacgtagacccagacacatgcccaccctcacagcagcagatgctaggatggaggttgccctgggcagggcgggaacacagaacaggcactcagggcggaaggggacacaggagacagagcggcagagttgttagggcagccccactcacctgtcatgattcccacgtagcagtagctgtagctgagtgtctccatcagggagggcacgtcgggcagcagccccagggtgggccccttgctgaagcctgaggccatttccttcctctgggccagatgcaggtcctggacttcactggccaggctcaccagctgggcagaagggggtgggcaaggggccaggtcagactctgggcccttccccacacccatctcccttgcgcggctgccctcggcagccaaggggtgctgggtgcccgcagctctgcccatctaggttgtgtgtaacgcctctagctgggcggtgttccccagggctcagtcccaggccctcctcccctttccctgttctgtgcttacctgctctcacgcaatcacggaggtttcgatactatccacacgctgaggacgcccaaacgctaccccagccccagacctatccaatcaagtggcttattggcatttatactcggatgtctccaggcaccccaaacgcactggaaacggaacatgatgttacccaccccacaaggtagaccctcttctagtgtcacccctcaaacaacaggccaccaaattgttcaagccaaaaatctccctcactccccaaatccgatcctttaatctctctctctttttttttttttttttttttgagacaagttttgctctgtcaccaggctggagtatactggtgtgatctcggctcactgcaacccccacctcctgggggcgcaagcaattctcatgcctcagctggccaggctggtctcgaactcctggcctcaagtgatctgcccgccttgaaatcccttaagtttgagtctgttgcctctttccatctccactactgagctgaatatgttgtactctccaccctttcccaccagtcccaaggtccaccctatatcaatagatctccttcttccagcttgtggctgggttgtcagtagaaatccctggctggagacaaagtcaggagagggagggtagggcttttattcccttgtaagatggccttgggctggctgtcacccttgatagatcatttcaaggtgggtggctctacacaccctttaaaaaaaataattttggccgggcgcggtggctcacgcctgtaatcccagcactttgggaggccgaggcaggcggatcacctgaggtcgggagttcgagatcagcctgaccaacatggaaaaaccctgtctctactaaaaatacaaaaaattagccgggcatggtggtgagtgcctgtaattccagctactcaggaggctgaggcaggagaatcgcttgaacctgggaggcggaggttgcggtaagccaagatcgtaccattgcactccagcctgggcaacaggagtgaaactccgtctcaaaaaaaaaaaaaaaaaatttagggccaggtgtgacggctcacacctataacactagcactttggttggcctaggcaggcagatcacttgatgtcaggggtttgagaccagcccggccaacatggtgaaaccccatctctactaaaaatataaaaattagcaaggcgtggtggtgggcgcctgtagtcccagctactcgagaggctgaggcaggagaatcgctcgaacccgagaggcagaggttgcagtgagatcacaccactgcactccagcctgggcaacagagcgagactccatctttaaaaataaataacatttaaaaaattaattttttgtagagacagggtctcactatattgcccaggctggtcttaaactcctggcctccagcagtcctcccactatgacctcccaaagcgctgggattatacaagtatgagccactgcaccaggcctacacaaccctttttccatccaggtaccacaacctgacccatttcccctgggcctagggttgggaacggctccttctgccgggctggggttcaggcaccatcccttcttgctcttctacatcctgcccaattggtggccactccttcagtcatcctaaatgcgcgtttcctgctgcaactcagacctacccacagccagccaacggcctgtatcaagccaccacagtttgtcacctggactcggacaaaggaggatccctttatctgagtccatcccatcttgccctgttccacttcaattctccttcagcatccagaacgagttttctttcttttcttttcttttttttttgagatggaatcttgcccgggaaggcccaggctggagtgcaatggcgggatcttggctcactgcaacctccaccttccaggttcaagcaattatcctgcctcagcctcctgagtagctgggattacaggtgtgagccaccacacccggctcatttttgtatttttagtagagacggagttttaccatgttggccaggatggtctcaaactcctaacctcaggtgatctacccgcgtcagcctcccaaagtgctgggattacaggcgtgagccacccgcagctggcctagaatgagtatttctatttgtttatttatttttgagatggagttttgctcttgttgcccaggctggagtgcaatggtacgatctcagctcaccacaacctccgcctcctgggttcaagcaattctcctgcctcagcctcccgagtagctgggattacaggtatgtgccaccacgcccagctaatcttttgtatttttagtagagacagggtttctccattttggtcaggctggtcttgaactcccgacctcaggtgatccgcctgcctcagcctcccaaagtgctggcattacaggcgtgagctactgtgcccagccagaacgagtatttttaaacatttaaaactggtcacattgcctcttctggcagcaaaccaaaaatcccctcttccagcagatctcaatcctccacgggaagaagtccaatgtcctcacggtctccagccaggcctagcacggtgtcagccctgctgcctgttcccttttgctcgtcccagaaagtggatgtggctggtgtagcctgtggaacccagcctgctcccctccacacatcctgcggcctgaaatgctcctccacgaacccctctctcatccaacctactcctgccaccactgagctcccacagggcacactgaatgctgggaaggccactccctacctagcatgactgctgtgttcacggataagccgccagtaggaaaccatgactctgtgggtctggggtgggccctaggattctgtttttacccctcttcccaggtgattaggagccagacctggatgccctagttttgttcccttcaccaagtaccttctccccagagctggtttttctcctttgcaaaatagctggctacagagattcaaggacagcatgttggtaaaccacccagctgggcctctggcacaccgcaagcacccaatggcacctactgttaccctatgtgggttatttcctcaccccaggaggagctgggaggtgaagacctgcccaagggcatgtgaatggggaatgctgtgcccagggcagcaagtgaggtgacgtcccacccccagggtgtgttggaggtaaaatcccggggagccactgaagggggaggtaaagtgggaggtgaaggggcccacagggaggctggaggggagtggcaagccccgagtctgaccttcagcgtcagcagcagctggacggcattggtgaagggcgtgggagtgggcaggcccaggaggctgagggctcggaagaacaggagataggagaaagtccaggccagagccagggcgtggcaggagctgggcaaaagcaggaggcgcactgtgttgggcacagaagtctcggccttggccactcactccacgagtccagccaccaatcctcccccagctctccccattcgtttagagacagaaacacagaagggcagagaggacaggagggtggatgtagggaccgaatgagtatgattgaaacagtgggagaagaggctcagccacatagaaacacacaccaacagagaatgaggttaagagaagcttcgggtgaagaccctgcaatcctccactttttctttatttccgaggtccagggctcaagaagagagaggtggatatgaatgaatatgaacggtggccaggccagcagacacactgtccacctctctccatgacatggatgtagcggactgggacaaacacacagggaccagacgcagaaggcaggggagaaagaaaagcagatgaaggccggatgcggtggctcacgcctgtaatcccagcactttggaaggctgaggtgggcagatcacaaggtcaggagttcgagatcagcctgaccaacatggagaaaccccagctctattaaaaattcaagattagccaggcatggtggagcatgcctgtaatcccagctacttgggaggctgaggcaagagaatcgcttgaacccgggaggtggaggttgcagtgagccaagatcgtgccactgaactgcagcctgggcaacaggagcgaaactccatctcagaaagaaagaaagaaagaaagaaagaaagaaagaaagaaagaaagaaagaaagacaaacaaacaaacatgaaacagagaaatgagctgatcaacaagagacagctagacatgaggcagaagctgaaaaagactcaaagaggaaacaggttgcttccccctctcccctcctctccctctcctccctccaccaaattctcaccagggctgggcctgaatgagggcccaggtcccgaggatggtgaccagagaatgcaaagtgtgggggccacaggtgaacagggtgagccccaggcccacagcggctgctccccatctcttcagcccaggacctgcagggggaagggacagcataagcctggaaccttccagagggtcccccccctttattttccactggggagggagcctgactcaccggctttcttaaagaggaagccgatggggatggagataagaagaaccactagatacgtccattcttcaggcgacatggtctgggggaggggcagagattcacagtgagaacccaggaatccaggccccctgcctcctccctcttcgaggatccaggaacccagccttctagaccccagtttttgaggatgatggagtatgagcctcagctcctctcctttgagaacctagcaacccagactccagccccttcctccttggaggagacaggaatccacccccagcccctcctttgagcgcacaggcctccagctctcctgtccttggagaacccaggaaagtgtggggatctcccagcacccaagcccctcctttgcgaacgcagaaatcaaagctactccccgcacccatactggggacccagatttgaagacgcccctcttttaaaaacccagaaacggcacccctcccggacccttcctcttcgacagcccaggaatctagacctccgagccccctcttccagcgaggatccaggaacccagaccccctctttggatcccccatcccccggcccttgtgaaaccagatatccggaccccccagcccttctccttcgagaccacccagaggagcccgggtctccaacctgcacctccttcggagctccacacccctctcctactgagaacccggggatcgaacaccctcccctccccaggcccaggcccaggcccagccccaacccgtcccgcgcaccccagcgcatccccggcagagccacaggcggttgcgccagccccgagttccaacgcgcctccggggccgccccgcacccgccagcccgcagagaccctgccgccgtgtaacctcgcctcgccactgggcgccgccaccctggcccacctgagctgctcgccgggcaggaggcggccgagcagtcccagcccgcttgccgccgcagctccggccacgcctcccccgcccagcgcgcccccgcgccgcctgctccttctgggcgcccgccgggctgcgcagatcaggccggggaagaagccacggtcagggccccgggcgggcagggaagaagccccggagcagaagccgagagcgcgagtcggcaacgggattcgagtccaggtccacactgggatccgagctccgagtacgtgaaggggcgggccttcgggctcggaacaaggaggagccaaaagctttggacccgaaggggaacagacgggctctggaaaggaggcggggtctggagctcggcgtgaggaatgaggcggggtctcccttcgggttccttcgggcacaatcgggagcttgagttctccggaagcggggccacaaacttcggctcacttcggcaatagtcgagaacggagagctgaggccactgtgggcggagccacatgtttcggctttcttcggaggtagtcgagtccttagggtcactgttccgatgtgggcggggccacagactcggccggatgtgggtggggccacaagcttcggtttacttcgtagatagttgggtacaagtgacgctaggatgataggcggagtcaacaggttcgccagacacccatgagtatttacaagggggcggggcgaaagcgacttgccctcaaaggggcggaaccccgagggccggcgtgcgcctacgggaccgggccaggatgacgatcctcaagttcccaagtagaggagaggaagcggcagagggaggtgcgctcagtggggcggagccaaggtggcccccgcgggaggagggcggggcttcggtcctgcgaggggcgggacctgacttcccgcggcgctgatggggcgggatgacgaagttgacgagggtgtcggcatgagggggtggagcaaggagcgcgtggcgcggtgcgcagtgggtggctccacctcgactgcgaattactgtttatgaggtgactcgctggttctatcggtggacagtgggacattctgaagggaggcaaggaggcggactgagcgctcccaattggggtgagcccgcccgagcggagagtggacggcgggtgtccagggggcggggctttcggctgtggggttcggtcgtagggcgggaactccccaactggggtgcgctggcgctcggagggggcggggccacaggccgcgaggctgccgggagccgatgacgcccgaacgccgaacctattgcgtccgggaggaggcggggctacggattcggccgagccgagaacacccgaacgtcaaattgctggcgttcgagaagggggcggggctgcggattcggtggagccgaggacgcccgaacgccgaacttcctgtgctcgggagggggcagggttttgtactgtgggagtctgagagcgaggaggtccgaaagccgaatcacagtcgttcggaaagaggaggagcgaaggctcgagcgtccggaagagggtgtggcctcggcggtgccttagcctccagagcttctgaccgctgacgggaacacccgaagggggacgcccactttgcaagagggtggtgccaaaatggacctttgtaagggggcgtgtcgccgcgcttgcggaggtttgtttttcacgctccaaggcgcaatggtaggtacggcagtgcgggcacagagcgggtgccgaccgcagggtcacaagggtagagcgggaccctgggggcttggcgaggggagagggtcgggggcttgtctccggcgtctcgtctccggcggccgcgaggcctggtgggatcgcccgggggcggggcctggcgctcgggcccagcaggtggtgaacggcggctgagcgaggccccgccccctgaggcctaggggcggggcttcgccgagaccccggaggctttgggtgcgctgcagcggtccgcggcgcgcagctgtttcggtaactgctttgcctcccggctcccgcaggaggatgctggtggtggaggtggcgaacggccgctccctggtgtggggagccgaggcggtgcaggccctccgggagcgcctgggtgtggggggccgcacggtaggcgccctgccccgcgggccccgccagaactcgcgcctgggcctcccgctgctgctgatgcccgaagaggcgcggctcttggccgagatcggcgccgtgactctggtcagcgccccgcgtccagactctcggcaccacagcctggtaagggggcggggctcgaactcgggttcggtgggagcgggacctgggagtcaagtttcctggcttctgaagggaccataagcttggaggttccagcgaagtgtgcttctcaggccctgacatccttcaagcgccagcaagaggagagcttccaggagcagagcgccttggcagctgaggcccgggagacccgtcgtcaggagctcctggagaagattacggagggccaggctgctaagaagcagaaactagaacaggcttcaggggccagctcaagccaggaggccggctcgagccaggctgccaaagaggatgagaccagtgatggccaggcttcgggagagcaggaggaagctggtgagcatgggaggtggagtccagggaccacgggaaggagaggagagatcttttaggaattttagctgggaatccagtgcctgggtctccctgagggtgagaagactttaccccttgaatttaccaaactcttctctgtactccccaccaggcccctcgtcttcccaagcaggaccctcaaatggggtagcccccttgcccagatctgctctccttgtccagctggccactgccaggcctcgaccggtcaaggccaggcccctggactggcgtgtccagtctaaagactggccccacgccggccgccctgcccacgagctgcgctacagtatctacagagacctgtgggagcgaggcttcttcctcagtgcggctggcaagttcggaggtgacttcctggtctatcctggtgagtatgggttggggcctctggttgctgtgcctttccatacgatcccaatgtattctgcgtttttctttttttttttttttgtcttaatagaggtggggtctcttgttgcttaggctggtccctattcctgggctcaagcaatccttccacctcggccccccaaagtgctggaattataggcccagctgcatttttcttttttgtctcactttctcttagcctctgaaattcatagacagacaggaaacatttgggagctcccgaactcattgggcaagcagtttaacgacttttattaaatgattactgtgatccagaagattcacttagaagtagttagacatcaggctgggcgcaatggctcacgcctgtaatcccaacactttgggaggccaagacaggtggatcacctgaggtcaggagtttgataccagtctggccaacatggtgaaaccccatctctactaaaaatactaaaactaactgggcgtggtggtgggtgcctgtatttccagctactcgggaggctgaagcaggagaatcatgtgaacccagggggcagaggttgtagtgagccaagatcgtgccattgcactccagcctgggggacaagagcgagactttgtctcaaaaaaaaaaaaaaagcctagaagtggaatagttgtgtccaagagcatctgttttagagtatctatagtgatggctgaaatgatctcagatctcctcccagtggtcgttcccgtggcgtccagccgtctgccattggtcactgcttcagtgcctctctccttcccccaggtgaccccctccgcttccacgcccattatatcgctcagtgctgggcccctgaggacaccatcccactccaagacctggttgctgctgggcgccttggaaccagcgtcagaaagaccctgctcctctgttctccgcagcctgatggtaaggtggtctacacctccctgcaatgggccagcctgcagtgaactccagagacctaggggatgtggctgtgtcggcagcaagagcctttctggatgttccccagctcttctctgggagtctagaacatcctcctacctttctccgcggttagtttttgattccaggttttcgaacactacatcttttttatgttcttccttgtttcaaagcacttattggctgtgtttttgtagttacctattttcacactgtgagcttcccgagaatggggcctgggtttgattcatctgttttctacagggtttaagtctcaggaggtctcaataaacttggtatataaatgttcatgatttgaatgtttgcgacagtcctggaacccgtggatggtctcatctgcatgtacaggtgagaaaaaggcctggaggagggggactgacttgcccaaagtcacacacttagtaaatagcaggcctggcctttcaaaattggtttttctgactcctaaatctgcactctttctacctcactaaacttccttttgaaaagatttctatgaaatttcccagatgcatacaaacgttataaataaaaatataggctgggcacgatgacccacacctgtaatcccacagaacttttggaggccaaggcagggggatcgcttgagcccaggagtttgagaccagctctggcaacattgtaatacccagtctctacaaaaaataatttaaaaaaaaattagccagggatcccttgagcctgggaagttgaggctgctgtgagctgtgattgcaccactgccctccagcctgggagacagagcaagaacctgtctcaaaaaatatatatatgtgtgtgtgtatatatgtaaatatacacacatgtatgtatatatatgtgtgtgtatatatatatatattatgaaaggaaatgagtattgtaattttaggagttcagagcctggggagaaaggaaggactctggaaggcgttctgctttttcatggcctgggtagtggtgaatttttttgatactgtatatttatattttagactcttttttggatgtgttatattctgcaatttttataaaagctaaaacacatgtatttgtaaaaaatttgcacttatgaaatcatttacccatgtttttgcttaagaaagtactagaacactaccactattccaataattacacctttatcttatcaatgtgcagttttattttgtcacgtttattttgtcagtgtaatacattcacatggtgagtctgggcgtggtggcttatgcttgtaatcccagcactttgggagaccaaggcgggcggatcatgaggtcaggagttccagagcatcctggccaacatggcccgcctctatgaaaaatacaaaaattagccgggcgtggtggcgggcgcctgtaatcctagctactccggaggctgaggcaggagaatcacttgaatctgggaggtggaggttgcagtgagccaaggtcacgccactgcactccagtctgggcgacagagctagacactgtctcaaaaaaacaaaaacaaacaaaaacttccacatggtaaaattctggggctgaaagtctccacctctagttcttccatttcttccccccatgtttcattctttctcttttttgtgtgaattgagcagcctctggaaccagaataggtttagagagactcccatctcccctctttcttgccattcccagtaaacagacttcatagaatctcaatttcctgtaagtttagattaatttaaaatatgacactgggccaggtgtggtggctcacacctgtaatcccagcactttgggaggctgaggtgggcagatgagtttgagatcagcctggccaatatggtgaaaccccatctctactaaaaatacaaaaaaaaaaattagccgggcgtggtggcatgcgcctgtactcctagctactcaggagcctaaggcaggagaatcacttgaatccgggaggcagaggttgcagtgagccaagatcgcactactacactccagcctgggcaacaagagctaaactccatctcaaaaaaatgaaaagaaaaaaaatgacgctaacccctgtctggccaatactctctttgtgcctgcttcataattggctttgtaagtctattctccaccctttctcctctctacaacaaagtacttagaagtctcattccctctgtcatgagtctctcctctgaaaagttcctcatttaaaactcctgtggccagatgtggtggctcagacctgtaatcctagcactttgggaggccaaggtgggaagatcagttgagccgctgagctcaggagtttgagaccagccttggctgaacatagtgagacctcatctcatctctatttaaaacaaacaaacaaaaaaaaacttttgtgactggtgtccccccatgttgtcagtcaacaaattctataggtgccatgttcaaagcactgtggatccacagttaggccccaccctccaccttcactgccagtatcttagaaaaaccaaaccatggctcatttgatattgatagcttcctaactcatcccctgccttccattcttgcccctctgttgtctgttttcaacagagcagccagaatcatcgttttttttttgtttttttgtttttttttttttttgaggcggagtctcgctgtcgcccaggctggagtgcagtggcgcgatctctgctcactgcaagctccgcctcccaggttcacgccattctcctgcctcagcctccctagtagccgggactacaggcgcccgccacctcacctggctaattttttgtatttttagtagagacggggtttcaccatgttagccaggatggtctcgatctcctgaccttgtgatccacccgcctcggcctcccaaagtgctggggttacaggcgtgagccaccgcgcccggccagaatcatcatattaaaagataagtcagaccatgtcacagctctgtctaaaactttcctggagttttccatctcagagtaaaactcaaaggtcctactttgcagcttcctcatgaactggccatgtgcattctcttccttgcttattattattattattatttattttttttatttttgagacagagtcttgctctgttgcccaggctggagtgcagtggcacaatctcggcccactgcagcctctgcctcctgggttcaagtgggttcaagcgattctcccacctcagcctcccaagtacctgggattacaggcgcctgccaccacgtcaggctaattttttgtattttagtagagacagggtttcaccataattgcccaggctcgaactcctgagctcaggcaatccgcccacctcagcctcccaaagtgctaggattatagacatgagccaccgtgcccggccagctttgttcctctttactgctggatattccattgtatggacataaccccattttatttatccattcatcaggtgattggcatttgtttctagttaaggacaaggttttggttttggtttttcttttatttacccttgttcatgcagtatccccaggtccaagaacagttcctggcacacagcagtcaatacattgttgctaaataaatgagtggcttaaactataatttttaaatcagggctgagacaatttggaaattataatttctcctacatgactttctaagcatattttaaataaatatacatacgttaaggtcatttttattaatgaaaattgtagcatactatgcacacttctgcatcttgcttattggatatgcccaggcttgtctcatttttgccaacagctacatggttttgcgtcctatggatggggcataattagattttattacacttgtacaaaaggaaaggaattcagctccccaagcatgcccagctggtccttggcaacccatgatggaaaccaagggttcctcttatattacccgtgctcctttcagagaggaagggctagagggctccagcctgagtgagagagagagaggaggaagcatgaggggtttgtggaagagggcctggtgccatatgactggaccatgcttctgaagaggatcagggtgaggccagatctcatcagttgacccttgagcaacatgggtctgaactgctcgggtccacttttatgcagattgaaaaaagtaaaggttacacagagcatgcctgcctctcctgctttgccttttacctcctccacctctggcaccctgagacagcaagaccaaaccctcctcttctttctgcacctctgcctactcagaatgaagacaaggatgaagacctttatgatgatccacttccacttaatgaatagtaaatatattttctcttttttagaattttcttaatattttctttttttttttttttgagacgaagtctcgctctgtcacccaagctggagtgcagtggcgcgatcttagctcactgcaagctccgcctcccgggttcacgccattctcctgcctcagcctccccggtagctgggactacaggtgcctgccaccacgcccggctaattttttgtatttttagtagagatggggtttcaccgtgttagccaggatggtctcgatctcctgacctggtgatccgcccgccttagcctcccaaagtgctggggtaacaggcatgagccatcacgcccggccaatattttcttttctctagcttaattcatcataggaatacagaatataatacatatagcatataaaatatgtgttaattgactatgttattggtaaggcttccagtcaactacgagtaatgttttttttaaatcctgagacagtgtcttgctctgccagctgggctggggtgcaggggcatgatcttagttcgctgctgcctcaacctccttgactcaagcagtcctcccaccacagcctcccaagtagctggaactacgggcacacaccaccacacccagttaatttttctgttttctgtagagtctgggttttgccgtgttgcccaggctggtcttgaactcctgggctcaagtgctctgcccacctcagcttcccaaatcccacctggggttacaggtgtgagccacggtgcctggcctagtagttaagttttggggaagtcaaaagttatatgcagattttctttcttgatttttttttttttttttgaggcagtcttgctctgtcgcccaggatggagtgcagtggtgcgatctcggctcactgcaatctccacgtcctgggttcaagtgatgctcttgcctcaacctcctaagtagctgggattacaggcacctgccaccacgcctgcctaatttttgtatttttagtagagaccaggttttgtcatgttggccaggctggtctcgaactcctgacctcagttgatccgccggccttggccttccacatagtgctgggattacaggcgtgaggcaccgcgcccagcctatatggaggttttcggctgagctgggggtcagtgcccctcgcccccagactgtacagagtcagctgtgttaagatattaagcaccttcagtacacaagactctgtgctggttttcttttcttttttttttttttttactctaaatcatcaaaccctatgaggaaagtcctgttactttctcccatttagcactcttgaagaggctaatttgcctaagatcaagagctcgtcagtgactgctgaggttcaaacgcagatcttttttaagacttgagaacctacaggttcaaccaccattataaaaccatctctgtaatcacgaggcacccggaatttgtggagcttggacttcatcctgaagggagtgaaaacttatggaagttttttccttccacgtttcccccttccagatgaataatatacgcgtgttcaagatacaaaaatgcataaaatttggccaggcatggtggcttacacctgtaatcccagcacttggggaggctgaggcgagtggatcacttgagcccaggagttcaagaccagcctgggcaatatggcaaaaccccgtctcaaaacaacaaaacaaacaaacaaaaaacccataaaactgaacaaggtagtttgtaagatatggaagtacaatgcagatgacaataatgacgatggtagctaccactaggcgctttatttatgccactctcctcaacactggatagactctcacttaatcctcacaagcttatgaggtaggcgctaccatcattcgccgttttacagaggaggacgctgaggcacagagtgattgagaaacttgtcgaaggcactgcagctggcaagtggtgacgtggcatttgaatccaggcatccggatggtgtggatgccgtggaagagaaaggggcgggtgggactgcttcctgaggagatagtgactgccgaggcagcagcgtagggaagacaactgaagaacacgagctgtggagacagaccatcgcattcggagtggagagatgggtgtacagacagacaataaccagactatatataaaaagagaactctaggtcaggcgcggtggctcacacctgtaatcttagcactttgggaggctgaggcgggtggatcacttgaggtcaggcgttggagaccaggagttcaaaaccccgtctctactaaaaatttaaaaattagccgggcatggtggtgggcgcctgtagtcccagcttctcgggaggctgaggcacgagaatcgattgaacccgggaagcggaggttgcagtgagccgagatcgcaccactgcactccagcctgggtgacgagagcgaaaaactccgtctcaaaaataaaataaattactgataatagtactaataccccttaagtggctattgataataatagtaccatgggtgggggggcaacttctctgagagtgctctgtaagtatgtattgaagattgagtaaatacatttaaaattcttagaacagtatgtggcacatagcgttccagaatgccacattattgttagtgacagaaataatctcggctgggcgcggtggctcacgcctgtaatcccagcactttgggggggccacggcgggaggctctctcgaggccgggagttcaagaccagcctgggcaacatggcaagacgccgactgttaaaaaaaaaaaatgctacccgggcgtcgtggcgtgtgcctgtaatcccagctactggggaggaggtgggaggatcgctcgagcccgagaggttggtcggggcctcagtgagccgaaatcacgccactgcactccagcctgggcgacggagcgagaccctgtctcagaaagaaaaagaaaaaccaccgtccaggggcggagaaggaaggttctccctacttctcaggtttccactccctggccggaaaaaacctagtcctcccaggttagcacgccgctctagcccagcctcacgtctccactgcttctcagccagccaacgcctcttctgattggctctgacgtgcgtggtgcgtgaaaacgtcacgagacgccggcgttactataagagcgcagccgtggcgcttccgcgcctctttctcagtgaccgggtggtttgcttaggtgaggtgcggtggtgtgctttttctctagggtttgggttggatggtggcccgggccttccgagtttccatgagtaagctaaagacgttaggaaacagagcagggtggttgaacgggagtgcagcacggttgtgggggcagatactgactatgagagcgttggaggttattctcgcgagatcggatctgggctccgcgaggttttggcgtagttgtgggactgcgcaggcgccgtttggatcccttacgctcacacttctctcccgcgcaggcgcagacggggaagcggagccaacatgccagtggcccggagctgggtttgtcgcaaaacttatgtgaccccgcggagacccttcgagaaatctcgtctcgaccaagagctgaagctgatcggtgagtggccaaggcttccgggaagtggttcggcttccgggaggcggttagcacgtggatgaaggtgcccatgtactctatctagtccgtcccctaaatttggtactattcgtggtttaggaaggttttgtgattccaaagctgccagtctagttgttgtgccagtacgtgggactacacttgtccacccccttctccccaccaggcgagtatgggctccggaacaaacgtgaggtctggagggtcaaatttaccctggccaagatccgcaaggccgcccgggaactgctgacgcttgatgagaaggacccacggcgtctgttcgaaggtgcgtatgggagtccacagcagagggatggggtgcagggcttgtgaggttcattctcccttctgttgcctctgttccagtgatgagagttgtgtcattggataaatggaaccagccttctaacttttagtggcacttgtggagtaggaaaagtgtatctggatcagtctttgccctgtttcttaggtgtgtggcttttttgcccagttattggaccttcagtttagtaatgaccagagctaaagataggcctggcacacctgggcacccgtctatatctttatattctgtttatgtggcctgtttgctagtggatgagagtagactatgaagtggaatttctgggctaagtgatggtgataacagggtttgcacatttgcttggtttattgtttttttaattaagttttctcgttttatttagtcttttgagacggagtcttgctctgttgcccaggctggagtgccgtggcgccatttcggcttactgcaacccccgcctcctgggttcaaacaattctcctatcttagcctcccaagtagctgggactacagacaggcgcacgccaccacacctggctaattttacttttgagacggagtctcgctccattgcccatgctggagtgtagttgtcgcaatcttggctcactgcaaactccgcctccagagttcaagcgattctcctgtcttagcctcctaagtagctggaatcacaggcatgggccaccaagcctggctaattttctattattagtggagatgggttttcaccatgttgtccaggctggtgcttgtttttttaagctggtcaaggacatttaggtggtatttagcaaaggcctgaacaggagagaacctgtaaaatgtctcagggaacagcatttcaggtgatgactttaggagggcatgcagatcacatagacttaggcttactttactaattgtggtgaaatacacattaaattgaaaatgtaccatcttaaccatcttgttttaaaatctactctgagatgcggtgttattggagtgctttctacagcagattggcatgaccaagattggcatttgtatatcctgagacgctgcttttgcctgagtttgggtagtcatgatttatggtgaaaagcagtctctacacctgagccctgactgttaggcatgagagtggtcatccatgttaggcgttgagaaagtcctggcgcatgtttagctacagattatcacagtttgtcccaggcttgcagatgttagaagctttttctttaaataggcacaggatcttgcagtgttgaccaggatggtttccaactcctaacctcaagtgatccatccacctcagctttccaaagtgctggggttacaggtgtaagccaccgcacctgaccctttcattcttttcgtcaatttgtagaccccgttgataatctcatgaaagtgctggagatccctcccccatagatactgatgctgggtgggaattcatcccagggttctgtggggagtgggctatagctggttctggttttagggaggactttctggacatagatcctaattgcaatgaaacttacagtcatgtgagaaagcggtgcaggtgtctgagggttatttgtggttttccaaggcagaagtgaaaattcccaaggggtacacagttgttcaggtgagtacactttctagtaaatgaagccatctagcctagtcagggacaggaaggaggagcttggatgtttgctctttggtgtaatcctgccttgattcagatcctgcctttcccactaagatgtgtgactagcgagattctgagtctcgtctgttaagactgaacagccgccaacatttggctggcagttaataatcaacagatagaggccaggcgtggtggctcatgcctgtaatcccagcactttgggagaccgaggtggtcggatcacttgaggtcaggagacctcaagtcagagaccagcctggccaacgtggtgaaattccatctctacgaaaaatacaaaaattagccgagcatggtggtgtgcctataatcccagctactcgggaggctgaggcaggagaattgattgaacctgggagacagagactgcagtgagccgagatccgcggcactgcactgggtgacagcgagacacaaaacaacacgaactccccccccaccccccagcacaactgtgaagaaatgtaggagtcatgtccatttttcagatcagaaatgaaggcattgtaatacctaactgccttgtatgatgacaaggacctgtttcccactgaggtcctccctggtttgcatttttaaagcattttaaattctcttggtgcattggcccagtggagcctcagcagtaggacatgcttttgttgaaggtgtaaggtttattgtgctgttgaaaactattgtcttcatacttaaaggttttgcctgtggctgactctcctgttctttttcaggagatagatggttcaataaatgtgggcctgagtgcagtggctcatgcctgtaatcccagcactttgggaggcagaggcaggcggatcacccgaggtcgggagtttgagactagcctgaccaaagtggagaaaccccttagtctctactgaaaaaatacaaaattagcggggcgtggtggcgcatgcctttaatcccaggctgaggcaggagaatcccaggaggcggagtttgcagtgagccgagatcacgccattgcactccagcctgggcaacgagagcgaaactctgtctcaaaaatgataataaatgtgaaacatttttttaaaatcatgcctttgttttgcctaatggtgacgatctcactttgtctcccgggctggagcacagtggcatggtcgtggctcactgcagcctggacctcctgtgcttaagtgatcctcctcagctctagtagctgggaccacaatccaccatgtaccaccatgcccggctaatttagttttacttttttgtttgttttggtacaaatgcggtctcactgtgttgccgaggctagtttcaaacttctggactcaactgatcctcctgcctcagcctcccaaaatattgggtttataggccaggcataagggactgtgcgtggcttaagtttccattttctaatgtaaagacaaaaaggcgtgaagtgtccaaagaggtaaatggtcccaaactcattttcattgccttttggacatgtttttgtattttgatattcaggtgtttaaatatcctctgatgttgagttaaaaaagaacaaaaattgaagccatagtatgacataggatgctggaaatgcacacagctggtgtttccattttgattctccctacctgtaactgctccctactgggaaaactttgggtcctcacaaagtgagctagctttctttcaaactttgcttggagggtaacagtgccaggaatatcagaagtgcctgatgcatgtagatctatttatgaaagcttgcttgaatggtttgctgtaactagtaagagccactttttataaaagtgcacataaggaaaaaaggttgaggtgtttaccccagtcaaggggcagttgatttgctgaaggcgtgtgggattatagcagtgagcgggagcctaggggatggcgtttgcccccagggccctggggctgtgggcaagggcagtccagagtattagctagaagccatggctttggacagggtaaggagcaagccgtcctgagcctggggttggaagaaaggtgtagtagggcatctgttggatattttatgcagtgcattgttaggttatatacatactagatatatttttggtggaaaattttgtacagaatagtaaaatgaatgacatgtacctagctggaaaaattctagtgttagaaattacttttctctccttaaaagatgtagatactgctatttatggcacggaatgtgattcaatctcacatctgcttaatcagaagagctgtctgggctgaggatatgaactcttcagcactgtgctttgttacggtggtagtagcttaatagcagctgcatttggtcttttgcagactgagtccttgtaaggaggtgatttcctttactcttgctaagaatgtggagcgagggatgtatgctctcagatgaggaggcaggtgtattttgccctcctgtcatctgcagtttactatgaatgatgacctgacaaccatagggtagtttggttttttgtattgttttgttttgtgacagggcctcactctgtcgcccaggctggagtgcagtggccccatctcaggtcactgcaacctccgcctcctgggttcaagcagttttccttcctcagcctcctgaatagctgggattacaggcagtgcgccaacggcctggctaatttttcgtaatcttagtggagacgggctttcgccatgttggccgggctggtctctcaaactcctgacctcaagtgatccgtctcggactcccaaagtgctgggattacaggtgtgagccaccactcccagcccgtagggtggttttgacagtgacatgggtcacggtgatggcgctgtactacttgtgcctcaccgccgcggcatggagctaccaagaggcggagccaggatttgaacccaagaagcctgaggtcagaaggcggaatcagtgtttcctcccactcttcccaggcaacgccctgctgcggcggctggtccgcattggggtgctggatgagggcaagatgaagctggattacatcctgggcctgaagatagaggatttcttagagagacgcctgcagacccaggtcttcaagctgggcttggccaagtccatccaccacgctcgcgtgctgatccgccagcgccatatcaggtaccacctcggatgggcacctgaatcttcctccacctgcccctctgatggttgccctcactaagcctgctgtccctatctcctatgcagccctcggaggtgatgggtgtgaactcacccagagggtacagattcacccttgcacacagctcaccagggagctggggcagcctcttgccccaatagcccagcgcaagggtcactgcggctctagccgtacaccttgtgaaggcctctgccaggcatgtgggcagctggacaggtaacagctcttggtgtccccagtggagggagagaaccagcctcacctcgcttgggtggtgggttcagctgtctcctggcccgcttgtgaagttgattccagaccccgatccatgactgcgttctgggtactcagtgtgccctttctgtaatgtggcaccattgagggggaggagctgtacagaaagagggcaagatgtttgcgtttagaatcttcgccccagcccttcactaaccctgtgagccgtaggcagagccttgtgtgtcaatgctttcgtcggagacgtagcctcgggttgctgtgttattgtgggcattgctgctgcacgtggtaatacagctcagtgtcaggtgtggggttcacgatatttcagactcggaacttgggggctctcacatggccatctcatttgctttgtggtcttaggtgggatactttcggatttctcctataaaatggggttgagaaagtcatctgaagcatttttggggattaaggtgataccctaaaaccccggagggcgcacgtaggatcaggtgcacccttcctgcagcgccttggtgtctgcagccgtggcggcctcacggggtgggtggagaggaaagagtggtgcggtagctggggttagcgtccgtttctcctccagtccacctcaccttgtcgctgcttccagggtccgcaagcaggtggtgaacatcccgtccttcattgtccgcctggattcccagaagcacatcgacttctctctgcgctctccctacgggggtggccgcccgggccgcgtgaagaggaagaatgccaagaagggccagggtggggctggggctggagacgacgaggaggaggattaagtccacctgtccctcctgggctgctggattgtctcgttttcctgccaaataaacaggatcagcgctttacaattggtgtgtgggggtctctcatccttgactctttcccctgctctaaacatgcagccttccctgggaggctcactcacttgggagtgcctaccagctagtggtccctggcctctcagtactattctacagtagtgaacacacatctttaccagaaacttctgtcatcaggggagagacgagtggtatttttggaaaaactgtgtcaaaaccagaaggaaattccaagtaagccggtgtttgcatataggggtgggagggagccggtcattgctaggcagggcaggcgccgagtggaggtgggggccttccctgcctgctggccctgggaccctgaccccgccaggcaagagacaggtgggacgggagctgaccagaggctgacgggttgctggggaaggtgaactgttggtgattgttggggaacacttcacagaatttgcttgctagtttcaaagcttgtgatgcagttgatgttgggcaagttcccagttttgtcttcacatgtaggggaagtgggttagcgtaggagaaggggcgttgagggaagtctgttcctcctctccgcgttcagtgcttctgtggactcacggtcaagaggttggcaggcttcccttttctcagccttgttgatcatctgtgttgggaaggggtttggtttctgaggaagtgagaaacctgaaattgtgcaaccccctcaggctgcaggctgtagttgattgggtccttatctggaggccttcagggtttgaggtcagggcagggacagttctggaacacagctaagttactgtaaaccacgtggagaagtccattgcggcttactcaagctaggtggttggcccttccttccctcagcgttgctacttgggaaatgacggtggtcttgtgtccatggggccagctgctgcaccatctgggctcactgtggtctccttccttggagcgtggggtctgggctagtggatggccggggcagcgtactcactgggctcctgggagctcccctgggaggaagagactgcagttgtctctggtctgagaggtggtggctcacctgggtgtagctcacaattgcggagctccacggcagcctggagggaggggagagtgggagttgaggtatgcggttctggggagaagcctacgggcttggaaaggaaaagggtcttcagggctctgtctacagaggcagcgagcggggcaacagagggagactccatctcaagaatttgtagagatggagtctcaatgtgttgccccggctgatctaaaacccttggcctcaagcaatccactcgcctcccaaagcgctaggatgacaggtgtgagccacagtgcctggcctgcgtgggtctgtttaatctccgggcctcttgctctccctttcttggtgatctccttggaccacatccctgtatcattctctctctcgaccctgagcccagggtccagagcagagaacgggatggggtctgggtaggggcccctcacttgcaaccaggatgttgggtgggggcgacgggggaccgaccttgggcaggaggcattgtgtccaccgcagcatctgtgctggcccccaggggggtggctcgcatggcccagggggacgtccaggaggtgctgcccatctaggcgctggcgggctgggagccccttgtcctggtcaatgcagagctgtcaaaaccggcctctgagtgatgctgaggggtcaggctgtctccagagagcaccggcgatcccggctgtgctgagagggagggctgagggctgcctggacgcccctgagatgaggcgactggtatttaggggatgcgtactctctggggcccgctggggcctgcagggagagctctcaccggtctcaactccatgccttctgccttgtgcttctggcccaagaggtcggggtcactgaccaccccgtgtccacctaaggcttccctggacacacagcagggagatgggcaatgagggtgggggttgtggccctgcctgtcacggtccccagcagtgcagatgaattagaccattgagccacagagcctggagggcagatgggtgtgctggtataaggagccccgggctctgtgttacaggtcatgtgttctcaccagtggccttgcaggaggggaacagccccttccccagggcctcgctctgctccccctgaaggatggggctgaggggacagcaggctctgggggcctttcagaccacatttgagtcaaaatttgacttccccatactctgcctgcttccacctcacccaactctcatccaggggtgacccttgttctagcacatgaggctgaggccagagagggcagggccttaggacacagcccagtcactgttctaattctagaggcaagccccttccatgtcctgagctctgtaatgcatcttttctttcatgagccttgcgatcaggcgatgtttattcagtggttaccacatccaggcatgctgccaggaggaggggagtcgtgggtgaagctgataggattcctgctggactcacagagcctgggttaatgacacattacccatgtttagataggaggtaattctgctccggtttcgacaagttgtaggaaaggaggaaaacatgctcatagcaggtgagcagcgtacacctgtcatgggagtgaggggtccttctgggggatggagagaccaagacgtgaacagtgagtgtggcacgcagagtgtcctccaccagaaacagtgtgggctgttctcagacctgagagtgagccaaaggaagctgggaccttgtcattcaggggacttgtgcaccgtgaagatttattggatgctatgtttaagaaaatggaaaatccggcccggcacggtggtttgcacctgtaatcccagcactttgggaggcggaggtgggtggattatgaggtcaggagttcgagaccagcctggccaacatggtgaaaccccgtctctactaaagacacaaaaaatcagccaggtgtggtggtggacgcctgtaatcccagctactcgggaggctgaggcaggagaatcacttgaacccgggaggtggaggttgcagtgagccgagatcgcgccacagcactccagcctaggtgacagagtgagactccatctcaaaaaaaaaaaaaaaaaaccggggaatctttagaaagcacagtggaaacagatgtctgtttttacaagcccatcactgcacagaatgcaatatgggagggtttcactaatggttaaccataaccacactccagcgtgagcccagccactaggcaatgtgctgataaggattctaagtggtttatgtggactcctcatgacctatgacacacatacgtttacagtggagtggaacgaggcaggagggcttctctttgtcatagtctaccagctctgcagaggtgtcagctacatccggattggctcagggagcggccgtcagaagacttacacgtgtttaataactgaggttgtgtgtgtgtggcagggggtgggtaactgtgatgagtttggtgtggcagagggggagccatagcctgtgaagctggaaagtgtatcaggtttggtcatcaacaggcttgaacatgaagtacaggaacgtgcatcttatttttggaagatggagccccgttgggggaatttgagcagtggagggtcacagccaggtaagatggtcagaagaggcctcggaagtgatgagagggatggactggagtagggatgggagccagtagggggccaggagggaggttggtgcagtgcacagacagggcgtcctcggtccccagctgagcttagactgtggggatggaccagcggacacgggtggagccgggtgaggagggatgtgggcagagaggtttggatttgttcactgtgtgtgaagcagaagagtgtgaggagcttttccactctctgccttggttgatgggaggaaccagtggggctgccgcaggacagacgacccgcgtgggagaaggaggctcggggagatgtttctaagacttaacttgctcacagagggaagcacaagcttccttcgagcctgggctttgttttcccaaacaggtcccttcactgactttcttttttgagacggagtctcgctctgtcgcccaggctggagtgcagtggcgcgatctcggctcactgcaagctccgcctcccgggttcacgccattctcctgcctcagcctcccgagtagctggggctacaggcgcccgccaccacgcccggctaatcttttgtatttttagtagagacggggtttcaccgtgctagccaggatggtctcgatctcctgacctcgtgatccacccgcctcggcctcccaaagtgctgggattacaggcgtgagccatcgcgcccagccaactttcctgttaatgagtagcactctttttttctttcttttctttccccctttttttttttttttagacatggtcttgctctgtttcccaggctggagtgcagtggcgtgacctcagctcactacaacctccacctcctgggttcaggtgattgtcctgcttcagcctcccaagtagctggattacaggcacgtgcaaccacgcctggctaatttttgtatttttagtagagacagagtttcaccatgttggccaggctattctcgaactcctgaccttaaatcatcctcttgccttggccccccaaagtgttaggattacaggcatgagccatcatgctcggcctcttttttctttttctttttttttttttttgtttttgagacagagtcttgctctgtcacccaggctggagtgcagtggcgtgatctcagctcactgcagcctccacctcccaggtgccagcgattctcctgcctcaatctcccagttagctgggattacagatgcgcgccaccatatccagctaaattttgtattttttagtaaagacagagttttaccatgttggccaggctggtcttgaactcctgacctcaggtgatccgcccgcttcagcctcccaaagtgttgggattacgggcatgagccaccatgctcggcctcttttttctttgcttaaaagatgaggcctgttgcccaggctggagtgcagtggcactatcatagctcactgcagccttgacatcgtggctcaggtgatcctcccacctcaggctcccgagtggctgggactacagacgtgcacctccacagccactacttatttttgtagcgatgtctatcagctggtgaatagagaaagtgtggtatatccttacaacaaaatattattcaaccgtagaaaggaatgaagtactcatacatgctacatgtgtgaaccttgataatatactagataaaagcagtcaggaaaaaaaggtcacatatgacgttatttcatttataagaagtatccagcctgggtgtggtggctcattgcctgtaatccagcactttgggaggccaaggcaggtggattgcctgagtttaggagtttgagaccagcctgggcaacatggtgaaataccatctctaccaaaaatacaaaaaattcacccggcatggtggcatgtgcctgtgatcccagctacttgggaggctcaggtggcaggatcgcttgagcctgggaggcagaggttacagtgagccgagatcacaccactgcactccaacctgggtgacagagtgagtccctgtctcaaaaaaaaaaaaaaaaggtattcaaagaaggccaatcgatagaggcagaaagtaggttaattgttgcatgggattaggtgggagtgattgcttgatgtaaactcggtttccttctcggtatgataaaaatgtttcggaatgagatagaggtgatgcttacaccatattgtgaatttactaaatgccacaaaatagagttgtatctcaataaaaatatatttgttgggccgggtgcggtggctcacgcctataatcccagcactttgggaggcaggcagatcaagaggtcaggagttcaagaccagcctggcaaaaccctgtctctactaaaaatataaaacttagccaggcgtggtggcatgtgtctgtaatcccagctactcgggaggctgaggtagaatggagcgagactccgtctcaaaaaaatatatatatatatgtaaatatatatatgttgggcatagtggtgcacacatgtagtcccagctacttgggaggctgaggcaggagaaccacttgaacctgggaagcggaggttgcagtgagccgagactgcaccattgcactcctgcctgggcaaaaagagtgaaactccatctcgaaaaaaaaaaaaaccacacacacacacgtagataaaatcaaatattctgtattccataaatatgtacaattattatttttcaattaaaaactcttaagctgggcacagtggctcatgcctgtaatcccaacactttgggaggcggagatgggaggctcttgagcccacaagtttgaggccagtttgggcaacatcgtgagatcccattgctacaaaaaaatttaaaatatatttttaaaaaactctaatacagtagtccccctttatctgtaattttctttctgtgttttcagttacctggtggtcaaccatggtccaaaaatattaaatagaaaagttaaggaatcataagttttttttttttttttttattgatcattcttgggtgtttctcgcagagggggatttggcagggtcataggacaacggtggagggaaggtcagcagataaacaagtgaacaaaggtctctggttttcctaggcagaggaccctgcagccttccgcagtgtttgtgtcactgggtacttgagattagggagtggtgatgactcttaacgagcatgctgccttcaagcatctgttcaacaaagcacatcttgcaccgcccttaatccatttaaccctgagtggacacagcacatgtttcagagagcacagggttgggggtaaggtcacagatcaacaggatcccaaggcagaagaatttttcttagtacagaacaaaatgaaaagtctcccatgtctacctctttctacacagacaccgcaaccatccgatttctcaatcttttccccacctttcccccctttctattccacaaaaccgccattgtcatcatggcccgttctcaatgagctgttgggtacacctcccagacggggtggcggccgggcagaggggctcctcacttcccagtaggggcggccgggcagaggcgcccctcacctcccggatggggcggctggcctggcggggggctgacccccccacctccctcccggacggggcggctggccgggcgaggggggaatcataagtttttaacaaatcaaaatatttctaaaaacctagagtaggcaggaaaggggaaacaacacacagcagaggagacaaacaaaaaggcacacctgaacacagtcatgcaccgcataacgatgtttcgctccactacacatttcatatgtgatggtatagcctatgtatgtagtaggttataccacgtaggtttgtgtaagtagactctatgatgttcacacgacggtgaatttttttttttcttttttttgagatggagtctcattctgtctcccaggctggagtgaaatggcacgattttggctcactgcaacctccgcctcccaggttcaagcgattctcctgcctcagcttcccaagtagctgggattacaggcatgcaccacgatgcccggctaatttttgtatttttagtagagacagggtttcaccatgttgagcaggctggtctcgaattcccgacctctggtgatccacccatcttggcctcccaaagttctgggattacaggcgtgagccaccacgcctggccaaaattttttaatgatggctttctcagaacatatccctgtcattaagtgacatacggttgtaatgtcatcagtgattacattaaatataagtgatcaaaaagagattacaagattggaattttttttttttgagacagagtcttgctctgttgcccaggctgtagtgcagtggtgtgatctcggttcactgcaaccactgcctcctgggttcaagcagttctctgcctcagcctccctagtagctgggattacaggtgcctgccaccacacctggccagtttttgtatttttagtagagatggggtttcaccatcttggccaggctagtcttgaactcctgaccttgtgatccacccgccttggcctcccaaagtgctgggattacaggcatgaacccccgtgcctggcctgttgtttatattttatcacattaaaaaagcagaaggatgaaaaatgtattatgcaaacactaatcaacagataatttcaccggcttgttagttgttttgtttttttgagacagggtctcgtccaggctgaagtgctgtggtgcgatctcggctcattgcagcctcgacctcctgtacccaagtgatcctcccacctcagcctctcaagtagctgggactacaggtgtgtgccaccacgccggactggttttattttttgtagagatggggcctcacaatgctgatctgactgactcgaactcctgagctcaagctatcctccccacttgccctcccaaagtattgggattacaggtgtgagccactgcacctggttatgcttcttttttattttttttctttctttttttttttttttcgagacggaatctcactctgtcgcccaggctggagtgcagtggtgcgatctcagctcactgcaagctctgcctcccgggctcatgccattctcctgcctcagcctcctgagtagctgggactataggcactcgccaccacgcccggctaatttttttgtatttttagtagagacggggtttcaccgtgttagccaggatggtctcgatctcctgacctcatgatccgcccgcatcagcctcccaaagtgctgagattataggcgtgagccaccgcgcccggcctatttatgcttcttaattttcccatgtcataagttcgatgtataatatttacattatcattcagtttaaaacattcactgtttttttttttagagacaaggtctcgctctgtcacacaggctggagtgcagtggcacagtcatagctcactgcagcctcagcagccttaacttcttgtgttcaaggaatcctccccactcagcctcctgagtaccacacccggcctttacgtctgtttttgttttttgtttttttgttattaactcattgattgttgagaagtctgttgctttatttccaaaatgggacgatattagtcatctttgagtcaggtgagtcccacaagttcccagcgtctcctcatggtctgtgttaggggtccaggctgactggggttcactggtgtccactgggggcagctcccgtgccttcagcagtcctgagtctccttctgctgagtgtggggtctgcgtaccccccgggctagtggatggccagagtggcgtagatgctgggctcagctggaggttccccttcctgggatggaggaggctcagttgccttccgtctaagggtcaagctgtgcagctgggcgtaggtcacatcctgggaggcttcagatgcagcagcctgcagcgggggagagtgagaggtaaggaacgtggtgggggtgggggaggcctgggggcctggagaggaaaggactcacctcagtgtccatctgcctgtcctcttccacctgtctgtcctttgtgtccaggaattccccagacagtgaggagggaggagaggccatttctctcctaggactggagtgtttcaccggggcatacgtcactgcctgggggtcttcatcgtgtgggctctgctggagagagacagtggtggggggtgtccttgagtccccctgacctcctggagtcaattttcctcactgttcccggggtgatccgattacatccctttcctgatggaatctcagggacgccctaaggccgtggagggtctggccgctccctccctgtggttctggcctctgctcctcactctgaccttgcccatttggctgcagcctcacaggccttcctgcaagagctcgctgctgcctgggggcctttgcacggctgtttcctctgcctgcaggggctcgtccatcagaggatcatgtgccccactctgtccaggcttctcagatgacagctgagcagacagccctccccttccattcagactggccccactgccccacactctctgccctttccctggtgtatgttccttacagcacgttgcactcctggacacgatgcatttatttgcattttgtctcccaccgtgaggtgagctcaggaggcgggggcggctttgctccctgctgtgtctgcagctcccatggggagccccatccacagtgagctccctgggaacactcgctggatgaatgaatgaagaggagcccaggggacggaggtggttcatttattcgtcatcctcctgaggcctggggagagctctaacaaccagacggccaaacagaggatgaggagcaggaaggggacccgggaggaggcccacgaggtcccaggacagcagaagagagtgaggtcacagcaggcgggaggcagcatgctggacaaggaggggtccaccgtgacgatgctgagagccgggggaaggaggacagagaagtcctgcaggattagatctggcaccaggaggcctttggtgcctgggacggggcgggatctcacctgactgtccagctccaccctgtcctcagactgtgtgtccttcacagcagcatctgctggggcagagcaaggggttcgtctcctggttctctgagacctctcagtcctgctggccccctgccctgctcccagatggggccaccgaatgcagggaggtcccacagtgtggggcaagaccatcttccacggagccccagacccttcccagcccctccctgttgctactgaaattttgggactcctgtctctccagcacccccatttgtcccctctcttcctcttacagaggttttcttcctggacgtcagcagctgggctggacctggaggaggacatgggagtgtgaggggcagtgtatgggctgtggtgggtgggagtctgtggtctttggggcagaattacctcctcagcaggcccctgtccttgggctctgtctccgcagcccctgcaggacgctggaaatcagtctttctctggtctgggtgaagatggacagagtctcagccctgggaacattagaactcccattctacacatgcaacttgagggaaagaaggaaaactaaaaatattcctgcatggatgttccaaatattttatgagatagaaaaaaactcccatgaatactgaagtttgtaaatgcgtattgaaattacgtgcccctggaaccggttttctaaactgacacccctgtgtgtttgggttccctctggctggtgccctgagcccaccctcggtcgacccatgggtcccccgcttccctactcaccagatgtcctgtgtttgctgtgacgctgacggaggaggaggaggaagaggaggaggaagagcagcaggacgaaggccaccgagaccccaatcaaaacctccaggtatcttcccagaccttgacatgaggacgtcaggagtgggaatgatgtcattgatgtgagcacctactgtgtgcaggcgcgagccaggtctttccttcgtgacctccaaccctcacaagcagtcgtgcaacatggaattgccacccgtacaacccatttcacagatgcacaaactgaggctcagagcagggagtcgcctgccccaggcctccagcgaggaagcggcagagctgggaagggagcccgggagtctgacctgcagcccttgttcctgcaccagagccgagacccggagctgcagggaaagagcctgaccgtcctgaaccacggccctgctcccctcccctgccccaggtcaccgtcactgctgcaggtgggacgggacaggcccctgtggaatcgggtctgggaggttccctgggaggcctcctctcccaggaggtcacagctgggggtcagagctgaaaggaactttcccacccacaggcctctctcctttacacttggagaaactgaggcccaggcaggggaggggcctgtccacatcaccacctccagaggagcctgaacctaggacagaacccacccctgcctcccctggaccccgcccatctcccactcagagcccctcactcaccattctgagggcctgaccctggggggttaaggggctggtcctcaggacctcctgggtcaggacagggaggtgaaggctggggctgtcttgccccccacatcagcccggctcctcctcctggctgggccccaacatctccctctgcctcgacccccgcccctcaccagcccagcctcagagcccctgggacacaagcccgtccttgaggggaggggagtgggatcctttgggagactcagactgccctgggggaggcggcgctccccaagaggcctcagtgactcaccaggtgtggagggcggccctgtgggtgggaggctggagcctccagagtgtcctggaaggagcacgggaggcgggtgaggggcgggggccgtccatggagtgcacccttccactcccactctcctgcttccgcccagtggattccctggaaccatctctctgcccacctggtgccttctgcatgccaggcaggggagaacgggtggccacgcctaggagaacccctgttggcctcctcccctctgagggctgggtgccctctggctaagcctccctcacagcctccctcggtccatcccagccgagagctctcctgggggcctgggccggagctgagcctttgagctcagagaggacggggtcagcgccctcacctgagaccatgagttccaggggctcactggggaaagacagcaggtgggggttggagctgcgtgagccgtagcacctgtaggtccccgcgtgggctgaggtcacaggactcatggggaattcagcctggtacttatgagctccgtacattgatctcagacgcagtgggggatgggctgccccttctttggtcagaaggaaagtgtcaaaatacccccgtgactgacacagcagggtcatgttctctcctgaggccactgtggggcccggctgtgctgacagggagacggtgtcatagatctgtcctggagagaagaaggatgggtgaggggctgccccaccttgctctgagctgacacctccccaggcctctccctgggaccctcagtgtctctgtccctgttttctctgagtctcccctccccccatcccctgtctctgtctgtctctccctcccttgggacccccacccctcatcccggccatcaccacctgggctcccccggcagggcctgtgcagagcctgggtccctgactgaacccgctgggctcctcacctgtgatcaggatgtccagggggtcactgggggccgaccactcggaggagaggttgtgtgcaccatagcacctgtactggcccccgtaggagcggctcacagggcccagggtgaagttggcctgggagagcccagcctggggctgctggccagggcgctggaggaagtcacgttccccctccttatacagaacaaatctgtcgtagccgacatcagagccacactggagggtcaggctctgcccaggggccaggacagggccctgcagggtcaggagggagggcttcctagacacgcctggagggaaagaggagccaggactgagagggctggttcctcccacgccccttccttctcccgtcctggccctgcaggtctcactgtctctcacgctctgagtctctgaccccagggcctccttctcacccggggctgtcttggagtcatttcagaggagtggggtctccctagccctggccactgtgcctgatctttcctcctctccctgagagctgggacctcacagcaaacacaccgatgccttcctgagtcctccccttccaggtgaacgtggtcaagggctcctcctcccatgtcagagcctccccatggggtctccctcatgccttcagcccgtccttcaacacatcactctgggtcctttccagattcagtcaccagccaaactccccacaacctgtcagctgccccgaaagtgtgttagacaaggccgtggctccctcacctgagggcagaatctccagggggtcactggggtgggaccacacccagggggtgtttgtataatagtaatagcatgtgaacctccacctgtggctgggggtcacggggcccacagggaacagggcctggaaccccccactgtggagctgctgtgagtccagggtccgggggagctggtgttctccttccttcatcagaacaaaatggtgatatcccttctgtgagccacatcggagggtcatattcccccctgaggccaccacagggctgggcagggctgagagggtgggtttgttgtagaatcctaggagagaaagaggcaccgtgttaaatggggctcccacctcccacatcatccccagggctgggctgtgagagggagacgcccctgagagccgacccccttcctgagggcagagcctggggctgggaccccagagtgtcctctcacctgtcatcaccagctccagggggtcgctgggctctgaccagcctgcagagctgtaatagtggcagcggtatctccctgcatggtgctgtgtcatggatgggatggagaatctggccttgttcttgggttccagtgggttatttctgtcccagggctctgggcttccctctttatccagttggtactcctgggcctccaggctcccctgacaccagatggtcacggggctcccccagctgatcacagagcctggctcagcccagagggtgggtttggggaagggccctagatggaaatcagaggctggatcccaagacatccccacgctcagatcccagctcccagccccaggacttccccatcatccccatcagtcacccagaactactgtctcctcccccagctgcccatgggtggccccctgtcccagtgaggagtagggacctgggacagctggggacagactcacctgcctgcatgcgggtcctggggcccagactcagccctggaagagagttccctgtgaggcatttgccctgaagcctgagcaggtccccgcccgggtgcctcctgagcttttgaggtctcctgatggaccagggcttgtgtgtggggtggggttcctccaagactcggatctccccctccccatcttgaaatctcaccaaggcagagcagggctgtgagggcgggcgtcatggcgtctcctcccggtgaccccgcgctctgcagagggatgagccctcagtgctggcaggacagagagacacacagggtgtggccgctcggaggctgggtccttcttgtcatggggttgtctcatcctcagcccacaggaagaggaactgccaccccaagaacctggctctgatttccccagggctgaagtgggggcaggcaccaggctctctgcaggcatttcagagagaaatggggtctccctgcccccgggccactgtctgcctgatttatctttatctcactgaggacggggacacagccgcaaatagacctggtgccttcctgagtcagcccctttcaggcgagggtgaccgtgggctcctcctccctctcagagcctccccatggggtctccctccctccttcagctcgtccatcagttcagcgttacggggtccttaccatggcagtcgtctctccagccctggagatgcttcagggaagacccaggtccatgctgcaggcagactcagatcagcagagacgcacctgacacctggctgtgtagtccaggctgagctgcgtgtggcagtgagcacagagaaatgcagggtctaccgtggtggctcatgcctggaatcccagtacttcaggaggctgtggcgggtgatggcttgaggccaggagcttcagacagtcctgggaaacagactgtgaccctgtttctacagaaaagaaaaaagtgagctgggcatggaggctcatgcctgtggtcccagctactcaggaggctgaggtgggaggatcacttgggcccgggaggcggaggcttcagggagctatgatcaccccttggccttccagcctgggcgacagagcaagatcctgtctaaaaaggagaaatagaggggataaagagaaatatatatatatatgtttcattgtaatctataatctgattctggggaaggtgagctgatttgtatttaattcctgattatcatctagggtttatgtgactttggacatgaatgtcacctctgagcctgctgtcatgaaccccactcatcacagtggctgtgggggtcagtggtgcccaggacatgggaggctcagccatggtgaatttccagaccagttcagacaggagggtggggacgggagaggatcctggtgctgggctccacagtcgaggaggatgattgacgcccccactcaagagcccacatcggctccaaataccatgaaattctccttgtgatacgtctgaaatatgcagatcatcacagccacaggcagagaaagaggaaaaacagttcctcacattgagacgcatccccttccatgagcagagttcaatgctgagtggccacaggtgtctgggaccaccgagcgtcattagggaggaggaggctcccacctccatgtgggacagaagaggaaccccacgtcctcccaggcagggaggggtcagggctctgggtgaggctggaagcggtggctccccctcccctgtgtgtgtggacaggcgctggggggtctctgctcactcactggaggccacggtcagcgctcagcccctcccctgtgtgtgagaaacagattcgatccacggtggtcagacatgggcgtctgccccacaggtgagtgtgaggctggcgttggtcccatcgctgctgggcacaatcttgagctgacactgagtttgggggagtggggcaggagcagcggcaacaatccccttcatcaggctgatgcctggacagccgtgggagaaaccctttatgaaaggccaggtgcgtgggaggagccgccccacaggaatgacaaccgtatgaggacaaaatagacagttgttgaaatgcattagacagacatcgtgaaggtgaaaaactatattaaattaacgccattaaaaaggaatttatgtctgggcatggtagttcatgcctgtaatcccagcactttgggaggtggaggcgggcagatcacttgaggctaggagttcgagaccagcctgggtgacatggtgaaaccccatctctactaaaaatacaaaaaattatctgggcgtggtggtgagtgcctgtaatcccagctactcgggaggctgaggcaggagaatctcttgaacctggaagatggaggctgctgtgtgctgagattgcgcccctgtacttcagctgggacaacaggagcgaaactgtgtctcaaaaaaaaaagcaatttactaaccatatatacctactatgcaaacataacaaaatcaaagcataatttaatccagggcaagacagctgaaataataaatatatacattgggataaaatattcatgaaattttccagactgtatcatggaaagaacagaaattgaacaatagaaaatattgatatatacacgaagttgaatgagaagaaagaacgtgtctgtcacggtttcagaatgaaagaaggaagaaggatgttagttcatgatatgcatgaagagctaatggttgaaatttttacagaactgaagagaaaacatcagtttataactaaattgaatatctcgatcatggtaaagtgaaaaccatgaggcattaatttaaaataatcataaaactaccagagaaaatgtaaattacccttgaatgaatgacaagttcatcgggactggagttccaaagagcaaacagcagccccagaagatacaggagaaacaaccacaagcgtttaactgtgaggagagagttcctgtgctgggcctaattattactattataattatttattattattattattattatcttttgagatgcaatttcgctcttgttgcccaggctggagtgcaatggcgcgatctcggctcaccgcaacctggcctagttattattaaaggaccgagttgcagtgtcagctgtggataaatcctagaacataaggagactcggggcactcgtgacccgtcaggtcaggcggtggccttatgaggaataaggagggcgttttcagtgtccttttatcaggtactatgataacaacagagaaagagagagattgagacagacagagagagacggagagacagagagagattgagacagagagagagagggagagggagacacacacacacacacacggagagagacagagacagagaagcaggcatcgcttgagctgcaaggctgcagacatgtttgcatctgggctctttctgaaagcaatactaaacaatgtaaatcagggagtggaataatgaaccccaaatggagaagatgagatgctactgtgaataagtcaacagtacatacaaaaaacgaataagcatagatctatctgtaatctgtgtatatacaagtatatgcatttctactaagaatctgaaagagcaaggaaatggattcgcgtctctggagcctccagaaaggaatgcagccacgttatggccttgattttgtcctaaaagactgtgagataatgagtttgtgttgctgaagctgctcaatacgtgtaatttgttatggcagcaatagcaaaccaatactaacacaaacagcctttgaaaagaaaaatagatgatatttcacacttttatttatttatttatttattttattttattttgagacggagcctcgctctgtcacccaggctggagtgcagtggcgcgatctcggctcactgcaagctccgcctgccgggttcacaccattctcctggctcagcctcccgagtagctgggactacaggcgtccgccaccacgcccggctaattttttactatttttagtagagacggggtttcaccgtggtctcgatctcctgacctcgtgatccgcctgcctcggcctcccaaagtgctgcgattacaggcgtgagccaccacgcccggatatttcatacttttaaatcagcaatctgtgaagaagagaaagttatacactttcactcaaccaaccacatgtccttaaaatttacaaagcatcaattgagacacagtggaggatttgaagaaatattgatcagactttgatagattaagtgaacaaaatattcgtgagggttgcatggcacaaatgttcaatctcatgcgcaaatatgatgtttcgattgtttatatattatgtaaatttgtatagaaacgtttctggaatatacatatagcaacaaagtgggaatgcatatttctttatatatatttttttgaaacaaggtctctctctgttgctccatctgaagtacaatggcactatcccagctcactgcagcctcgacctcctgaggcctaggtgattctgccacaaccatttcctgagtagctgggactacaggatcatgccaccttgcctggctaaatttttttaatatgtatttttttgtagagacgaggtttcgctatgttgcccaggctggtgtcaaactcctgggctcacgggatctgcccaccttggccttccaaagtgttgggattactggtgtgagccactgtgcgaggccaggaatacttatttatgaaaacatattgatcagaaatatctatcttttttttttttttgaaacgaagtgtagctctgtcgccaggctggagtgcagtggcacgaactcggctcacggcaatctccaccttccgggttcaagcgattctcctgcctcaggcttgtgagtagctagaattacaggcgtgcgccgccacacccagctaatttttttgtatttttagtagagacgggatttcaccatattggcccagatggtctcggtctcctgacttcttgatctacccgccttagcttcccaaagtggtgggattacaggtgagagccactgtgcccagccgtctctatcatttttacacagcaaagtaagcatccaaactgttactacaggtaacgtttcctgattagaagttcaattaaattagcagccaacaataagaagacatttagagaaaaagcaatactttggaaacaaataacattctaaatattcatgggttataggctggatgtggtggctcatgcctgtaatcccagcactttgggaggctgaggcaggtggatcacttgaggtcaggactttgagaccagcctggccaacatggtgaaatgctgtctctactgagaatgcaaaaattagctgggtgtggtggcatgcacctgtattttcaatgactcgggaggctgagacgggagattcacttgaacccaggaggtggaagttgcagtgagccgagattgtgccactgcactccagcctgggtgagagagtaagactccatcgcaaaagcaaaaacaaatattcatgggttatagaatcacacaacattaaattgatagaacattaacgaaaaatgtcaatgaaattataacatatgaacgtttgtaggatgtaaagtaagagagtgagagagagagagggagcacaacaattaccaaatcaagatggaaagaggcaccactacccatcctacagacataaaaggactagtgaagcaaaactaggaatctatgctaagatgttttacaactcacatttaatagaaaatatcttgaagtatacaaactaccaaaatttactcaagaacaaatatatagtgtaacatttcctatttttattaaagaaattcaactggctgggattggtggctcacacctttaattccagcaccttgggaggctgaggcgggcagattacctgaggtcaggaattcaagacctgtctggccgacatggtgaaatcccacctctactaacaatacaaaaattagccaagtgaggtggcgcatgcctgtaatcccagctactcaggagggtgaggcaagagatctgtttgaacccaggaggcggaggttgcagtgaggtgagatcacaccactgcattccagcctaggcgacagagggagactctgaaaaaaaaaaaaaaaaaagaaaagaaattcaacctacactcagaaatctttccatagggaaatctggcctaaatgggtacactgttgatttctaccaaatatttgagaaagtaagaatgacatggaaactctagctatcattcagttctcactaggctcatcgacttcttcattccagtccatgggttcttatggacacatccagccagttcagtccaagttccttagtggggcagcagtttggtgctgttggtgttgctggaagctctttgacctcctttggaacagaaatatcaaacagtggtagcttgccccaaagtagagtggttgattctgcctttacacaggatacaagatccctaaaaacacaattatctcaaggtccttcaagcgctcagttcgaccctttgagaagaagcccaaccatggaacaaggagtgcagaccgcctgggcccacggacctgctccagcacctgttgggagaaggagtcctgtatcaaccaggcctttgccatctaccagccaaaaagcaatagagaatcaggagcagaggtgagctgaagcgcacaacgttccaaggccagaaaatgagcaactcagaaatgaaacaagagacaagcagctccaggtgctccttcagcgccaaggagagggcgtgggggtcatggggtggcaggggaagatttggtattcggcgagatgggccaatgaaatttgagaatttttttttttttttttggagacggactctcgctcggtcgctcaggctggggtgcagtggcccgatctcggctcactgcaagctccgcctcccgggttcacgccattctcctgcctcagcctccccagtagctgggactacaggcgcccgccaccacgtcaggctaatttttttgtattttcagtagagacggggtttcaccgtgatctcgatctcctgacctcgtgatccgcccgcctcggcctcccaaattgctgggattacaggcgtgagagaaagagtttgactttgaaagtgcaaatgcccaattcaacaaggaagagatgggcagagagtttcataataaacttaaattaaaagaagataaacttgagaaagaggagaagcctgtaaatggtgaagataaaggagactcaggagttgatacccaaaacagtgaaggacatgctgatgaagaagatgcacttggacctaattgcttttatgaccaaactaaatcctcctttgataatatttctggtgatgacaatagagaacggaggccaacctgggctgaaggaagaagattaaatgctgaaacatttggaatcccactttgtccaaaccgtggccatgggggatacagaggcagagggaggtcttggtttccatggtggcagagggcgtggtggcagaagtggtaccttgaccaccccttgaggatttcgcggcggattcagaggaggttccaggggtcgggagtttgcagattttgaatataggaaaagcacagcctttggcccctaaatagtctgaattgatagtactgctctctgaaagaaagacaacaaagctgctgcatagtctacaaacaagtctttgaaaacaggtgaatttctagctcttcatggtactggaaactgatttcagtctttgcgaagaacgaagaagtgaattggctgtatgtttgccatcagcactgggtttttgttttttgtttgtttttctgtttaatttcagagataaaatgcagttagttttcgggggaggaagccttatcttaagacatgaggattaaatatatttggaatagcagaaggttaaataatttcttatgtatagttaaactaaagcagtacttcagtgggacttataagtattgtgtcatcactgaaaggttttttttttttttttttaatcactgaattgtatttggtaattccaggttgcctgcagatagggccgtgatactgtgttctgagccaagaagggagggtgtgtgtgtgtgtgtgtgtgtgtgtgtgtgtgtgtatctttctcctcctttcttttggggaatcttgtaatattaaatagtctatttcatcaattaattagggtgctggatggtagagaattttgtcagtcaactaggtacacacggtaaatactgtttcttaggcaaacgaacttttttatacagttgtaaaattccattatattccaatgccaaagaaacattaaaaactttgtaaagttgtataaaaagcaactaattttttacaaaatagatatcctaaagttagccaaaaaaaagagaaaagggcaaagtgatcatttttggcgtagggtaacccttagtttcttccctggtagtaatttcccaccaggcagatcgtctaaccccaaatcacctaaaagtgcaggcccaggacgtgcttatctgcccagtgagtcacctggaggggtggtgatgggggctgttgatgacacgctcctttcctttcccagcccgtgtgttctacctctgaaaagacatagcattttcatttgcagagcccattatagaaaaataagaacaaaaatattagaaggaaaagacatagcatcatttagtgttcattcatatgaatatgtatattgtctacagctatctatatctctgttttatatctatgtctgttacaccatcagagagcacctaaagtgcagagtctcatccacaaactgtttcttgcatctactgtaagaggccattccgatgctctgtcagccccagcagcacccaaccactacatggcacgcatcctatctcagatcatccccaggatatcacgtggccctgttctcattgccccactgatttcatgggcgtgcaggtccctcgatctgagattaagtcatgagatgctccatttaaacaggcgggagcctctgattcctggcggagagccacagtgagcccagcagaacccatctgagcgccagcatccagcccggtcaggaggatttgctgccccctcctggtggaatgcgcgccatgtcgtcaagcggccaccagatgactcgctcgctggtccactcaaaggcatcacatccagagcgctctgctggtcacaggtgagactctcagcgacagtggtggctgcttggtccttggtaagagggagtcgctggtgttggttccatgcatgtccttttttctttgattcttttattttattttatttagagacggagtctcactctgtcgcccaggctggagtgcagtggcgcgatctcggctcactgcaacctctgtcccctgattctcctgcctcagcctcccgagtagctgggattacaggcaccttccaccacacctggctagtttttgtatttgcagtagggacggggtttcgccatattggccaggctggtcttgaactcctgacgtcagataatctgcccaactcggcctcccaaagtgctgggaatacaggcgtgagtcactgcgcctggcagcatgtcctttttttcttgctccatggccacgacactcacgggcccctccagcacgcactggggctgctgacacagagctggctgaagctcacggcattaacccagtcatcagcggatccttagatctcctaaccccagctgtgggcgctcctgctagcttctcaggagaagctcctggtcgagagcagacgtttctcctgtcctcctccagcctcagtctccggcagtttctgtgtgcctgggccttgagggtgggtttgtctccgtgtttctgtccccgctcctcatggcagctgcattgtattgagtaggtttgtttgatggggacgggttttctgtccctattccaaatttgcatatctctaatggtatttgtctaggatcacagtccaggattgttctctgcactcctcctagggtagagggattttatgatccaccttcttccggccacaatgagtcattacctgggatctgaggtgggcagaattatctgagcctcttccaatggcttatgtcttttcctccatgtgagagaaacacctgggtgggaaatgagatttcaggccatgcacagtggaagctctttctgtctgatcactaatgtggggtctccatcttgctccaaatcagttttgtgaatgcacggttgagacccaagaaaaagagcctttgggtgagtgcacagcacccctctgtcttaggtccccagatatatctcaatttgggcttcttctggaacatgaaactatttactttgagtttcctacgaaaacatagtgctggccttagacttcctatcctgaaaccccacgtctatttcccaacctcatgcatggaaaagtgctcgaatctccataggatcagcaagatctctatagaatctccatgggccctccacaggacctccataagatctcaataggttctccacaggttctccataggttgtccatagaacctccacaggacctccataggatctcaatagaacccccacaagacctctataggatctcaatagaaccctcacaggacctccataggatctcagtagaacccccacaggacctccataggatctcaatagaacccccacaggacctccataggatctcaatagaaccctcacaggacctccataggatctcagtagaacccccacaggacctccataggatctcaatagaaccctcacaggacctccataggatctcagtagaacccccacaggacctccataggatctcaatagaacccccacaggacctccataggatctcaatagaacccccacaggacctccataggatctcaataggacatccacaggacctccatagaatctcaatagaacccccacaggacctccataggatctcaatagaacccccacaggacctccataggatctcaatagaacccccacaggacctccataggatctcaatagaaccctcacaggacctccataggatctcaatagaacccccacaggacctccataggatctcaatagaacccccacaggacctccatagaatctcaatagattctccataggacctttgcaggacatccataggttctccgtggatcttcataggacctcgactggatctccataggatcttcacagggcctccgtaagttcttcacaggatttccagagttgccacaggatctgccactgcagggaccagccggcatcctctacatcccaagatgctggaaatgaccacgtggtgatagtggttatggatttcctacaggagaatgtgtgaaaccatgttcctgggcaaccctgcggagtcccaatctccattcagatcctccaggggccaggctggagggggtgtctggtgtgtcactgtgtctgttcacacagaatgggggcttctgcagtaataatgggaaaccagcccagagatagaggcagggattggagttatgctgtcataatccatgaagtgctgagctgaggaaaccagctgagcttggactgtagcgttggacaggagacattgataaaaaggactctgtggtagaatggtgtggatttgttcattgtgtgtgaagaagaagatgctcagggaatgaaagctcttccattctctgacttggttgacaagaggaaccaatagggccatcacaggagcaatgaccccatgtgggaagcagactgaaggagatgtattaaaaacagttaactaagtcagagagagaaacagagcctcccaatacctggaaagcatggtttgttcctcccaaacttcctccctctgacttctttatttctctacgtagcagcacctcttcatttctccatcaaaggctctgagctgtttgagttcctcatatattctgatgatcaaacccttgttagaggaataggtaacaaatgtttctccctgcctctgtaggtcataacaccgttggttgtttcctgagctctgcagaagctttttagtttgatacacccatttgtctatttttgaattcgtttcctatgcttttgaggtcttactgatagaatgtttgcttagaccaatgtcttgaagcgtttcctctgtgttttcttctatagtttcatagtttcaggtcttactttgggtcttattctgtcttgagtagatttttgtatatcgtgagagacagaggttgagttttgtttttttgcatatggatatgcagttttgctagcagcatttattgaagaaactgtcctttacccaatatatgttcttggcatgtttgttgataatcagttggctgtcaatttgtggatttatttctaggttctttgttctgttccatttgtctatgtgtttgtttttaagccagtgccttactgttttggttactatagctttgtagtgtattttgaagtcaggtagtgtgatgtctccagctttgtttttttttctctacattgcgttggctattttgggtattttatggctctatattaattttagaattttttatatttcagtgaagaaagacacttgtatgttgataggaattacaatgaatctgtagatagctttgggtcctatggtcctttttgtaaacatttattgtttcaacgtgtgaacatgaggtatctttccagttttttcgtgtcctctttaatttttcttagagctttataattttatttgtagaggtttttaccttgtcagttaaatttattagcaggtcttttattgtttgtggctattataaatgggatttcattcctgaattctttttcagccagttctgttcttcagggtcaagcatcatgtaagttcccatgtaggaaaggaatccggaatgaacagcagctgcacacaaatgcctttctctgatttccacctcagaggggtccaggaggtgatcaggcacatggagcattgtcacatttggtaccaatcccagtgtgatccctaaaacaccacctgattgggttgagcctcatctctgaaataaccaagccctgtgtgatccctaaaccaccacctgattgggtggaacctcatttctggaataaccaagccctgtgtgatccctaaaccaccgcctgattggatggaacctcatctctggaataaccaagccctgtgtgatcatcctaaaccaccacctgattgggttgaacctcatgtctgaaataaccccaaggccatgttggtgtccttcatcccagttctggtggtttcaacataatgaaatcagaaagttatatggccacttaaaaatgtcaagtgcatgtcatgaagtactggacaaggtgtttccctttctgaggcccattcttacctgggtaagtggctcattgtctgcgtggactcaggtgaggttgatcaggcaggtgggtgtcatgttgtgaatgaaacacaaagtcaacctgtgagatcattgctctgacaggtcaagaaccacctggtttgccatttagtggccagtgcagcctgtggcattcaccaccacacttcaatctcagctccctaaatggcatgacaaataaagatagataggtacaaaaacagagatatgctattccctggttaaaatggctgttatctctaagacaaaaattaacagatgctgtcaaggatatggagaaaagaaacccttctaccttggtgggaacgcaagttggtgcagccaatatggaaaacagcatggaggttcctcaagaaactgaaagtagaacaaccacaccatccagtaatcgcacagatgggtatatttccaaaagaaagaaaatcagtatatcaaagaggtgtctgcattgccatgtttattgcagcagtattcacaatagccaagatatggaatcaacctatgtccatcaatggatgaatggataaggaacatgtggtctatatacacaatgaaataatattcaggcataaaaagaaggaaattgtaccatgttcagcaacacagatgaatctggaagacattatgttcagtgaaataagccaggcccagaaagaggagcatgttctcactcacgcggaagctacaaaagtgggccttgtgatggcagagagtagaatggttgtcaacagaggctggcaagggagtgtggaggacagggatggagagaggttggtggacgggtgcagaaatacaggtggagagaaggagtaagttccagggcctgagagctcagtagggtgaccatagttagcaacagattattgtattttccacatgagtgagaaatgaagatttggaatgttcccagcacagaaattataaaagttggccaggcatagtggctcacacctgtaatcccagcactatggaaagccgacgctggtggatcaccttaggtcaggagttcgagaccagccagagcaacatggtgaaaccccgtctgtaataaaaatacaaaaattagcgaggtgtgatggtgcatgcctgtaatcctagctactcaggaggctgagacaggaaaactgcttgaacccgggaggcagagtttgcagtgagccaagatcctgccactgcacgccagctgggcgacagtgcaagactctgtctcaaaataataaccataataacaaatgttcagggtgatgaatgtcctgggaacctttattggatcgttacacattgcatggatgaatcagattaccacatgctcccaagaaacatgtatgattattccgtatcaaattaaaattatgtgatttaccaataactcgaagtggattgagggtcaccaaatgaaagtcagcgttccagtgcccgcgtccagtggtccttggagtttccatgttgaacagaaccctccagtatttcctgatgtgcaagcactattttggattacataatctatttcctttatttatggggtctattttgagtttgcctccctagaaaataaatgctgcctctttttgagcttcatgtgcacaccttctttttatactcttgtttctttactcaacatcatgatggaaggttggtttgcattgctctttgtagattttgtctgtgcctctgcacggcctcgtagtatcccttggtggaattgaaccacatatgtttcctttgttttagatgtatttttgggttttatggctgttgtgtaatatgagcagcagtcctgtccatgttgttgtgaatgaaacctcaccatatgaacacattttcctctaggttctgtgctttgtgttcatagctgtgtgtctcttctttttttttttcttttttttttagatgaagtctcgtactgtcacctgggccggagtgcaatggcgccaccttggctcactgcaccaactggcgccaacttgcttccgtctcccaggttcaagcaattctcctgcctcagcctcctgagtagctgaaattacaggcacctgccaccacgcccagctaatgttttgtatttttagtagagacggggtttcactatgttggccaagctggactcgaattcctgaactcgtgtccgcccgcctcagcctcccaaagtgctgggattacaggcatgagccaccgcgcccggccatgtttcttctttttcactgggtacttctgatattttccccaaattgattcaagtaatttgcagtcctaccatggatgtattggatttctacgtgagccctactacctctgacatttgatattgtcattttcatcatgtgaaatgaatacctcaacattgatccctctcttcaggaatgatcgacagatagtccagaaagcataggctgtagattttgttccagaacctcctgggatcatcagattgaacacatgagggtgggagactgccatacaagctgggaaggaggaatcagatgatattgtcatgaattcctcaagagttagtgtttgctggcctccaagaggcaaggatctctgggaacttaagacagagaagcacttcacactcacccatgagctcttttccgtgggtctcaactgggcattcacaacatagattggaagtaaggtggagacccaaaatttgtgatcagacatgattaccttccacagtgtgtggcctgaaatctcacccccctctggaggtcctagattgtcctccagagccttctgggatcatcagatctgtccctgaggctccaccacgctgaagggtgcattgtcctctccgctgttcacctcccggctgcatcttgggggtttctctggctgtgctgagcctcaaataacagaatcccgaggaacaccaggaccaagcctgccatgcccatgcggatgagattctccactgtgtaatccttggcgtgtgaggctggggatggtgggcaaagaggtcacagaggtccgggcagatcaacttcacccaggacccctggatgcccaacccagggcaccccccatccgccattgacagaacctgaccctctgtgcccgccccataactgtctgacttgttttgtgatggggtgagggtctcagctcctcctgagaatcaaaacagaaggggagagccctgagccagcctctcccctgggctctgcgttcttattcttccaggcctcatgacgtggcttttacggagttcctcaataaaccctccctctcctgcagcagggctccctccagtctcctcatgaaactatttcagttttcctgtgttctatgaatttcaacgctgctcctgagccatttcctccctcccatgggctggattctccaccttcactcccttctttcctagtgtcccagagctctcctgggtgcagagcctgagctgagcatttgagctcagagaggacagggtcagggccctcacctgagaccacgagctccagggagtcactggcctgaccctggggggttgaggggctggtcctcaggacctcctgggtcaggacagggaggtgaagcctggggctaccttgctccccacatcagcccggctcctcctcctggctgggccccaacatctctctctgccttgaaccccccactcttcaccagcccagcctcagagcccctgggacacaagcccgtccttgaggggaggggagtgggatcctttgggagactcagactgccctgggggaggcggcgctccccacgaggcctcagtgactcaccaggtgtggagggcggccctgtgggtgggaggctggagcctccagagtgtcctggaaggagcacgggaggcgggtgaggggcgggggccgtccatggagtgcacccttccactcccactctcctgcttccgcccagtggattccctggaaccatctctctgcccacctggtgccttctgcatgccaggcaggggagaacgggtggccacgcctaggagaacccctgttggcctcctcccctctgagggctgggtgccctctggctaagcctccctcacagcctccctcggtccatcccagccgagagctctcctgggggcctgggcctgagctgagcctttgagctcagagaggacggggtcagcgccctcacctgagaccatgagttccaggggctcactggggaaagacagcaggtgggggttggagctgtatgagccgtagcacctgtaggtccccgcgtgggctgaggtcacaggactcatggggaattcagcctggtacttatgagctccgtacattgatctcagacgcagtgggggatgggctgccccttctttggtcagaaggaaagtgtcaaactgccaccatgactgacacagcagggtcacgttctctcctgaggccactgtggggcccggctgtgctgacagggagacggtgtcatagatctgtcctggagagaagaaggatgggtgaggggctgccccaccttgctctgagctgacacctccccaggcctctccctgggaccctcagtgtctctgtctctgttttctctgagtctcgcctccccgcccatcccctgtctctgtctgtctctccctcccttgggacccccacccctcatcccggccatcaccacctgggctcccccggcagggcctgtgcagagcctgggtccctgactgaacccgctgggctcctcacctgccatcaggatgttcagggggtcgctgggggccgaccactcggaggagaggttgtgtgcaccatagcacctgtactggcccccgtgggaggggctcacagggcccagggtgaagttggcctgggagagcccagcctggggctgctggccagggcgctggaggaagtcacgttccccctccttatacagaacaaatctgtcgtagccgacatcagagccacactggagggtcaggctctgcccaggggccaggacagggccctgcagggtcaggagggagggcttcctagacacgcctggagggaaagaggagccaggactgagagggctggttcctcccacgccccttccttctcccgtcctggccctgcaggtctcactgtctctcatgctctgagtctctgaccccagggcctccttctcacccggggctgtcttggagtcatttcagaggagtggggtctccctagccctggccactgtgcctgatctttcctcctctccctgagagctgggacctcacagcaaacacaccgatgccttcctgagtcctccccgttcaggtgagcgtggctgagggctcctcctcccatgtcagagcctccccatggggtctccctcatgccttcagcccgtccttcaacacatcactctgggtcctttccagattcagtcaccagccaaactccccacaacctgtcagctgccccgaaagtgtgttagacaaggccgtggctccctcacctgagggcagaatctccagggggtcactggggtgggaccacacccggggggtgttcatataatagtaatagcatgtgaacctccacctgtggctggggttcacggggcccacagggaacagggcctggaaccccccactgtggagctgctgtgagtccagggtccgggggagctggtgttctccttccttcatcagaacaaaatggtgatatcccttctgtgagccacattggagggtcatattcccccctgaggccaccacagggctgggcagggctgagagggtgggtttgctataggctcctaggagagaaagaggcaccatgttaaatggggctcccacctcccacatcatccccagggctgggctgtgagagggagacacccctgagagccgacccccttcctgagggcagagcctggggctgggaccccagagtgtcctctcacctgtcatcaccagctccagggggtcgctgggctctgaccagcctgcagagctgtaatagtggcagcggtatctccccgcatggtgctctgttatggatgggatggagaatctggccttgttcttgggttccagtgggttatttctgtcccagggctctgggcttccctctttatccagtcggtactcctgggcctccaggctcccctgacaccagatggtcacggggctcccccagctgatcacagagcctggctcagcccagagggtgggtttggggaagggccctagatggaaatcagaggctggatcccaagacatccccacgctcagatcccagctcccagccccaggacttcctcatcatccccatcagtcacccagaactactgtctcctccccacccagaactgctgtctcctcccccagctgcccatgtgtggcccttgtccctagtaaggatgagggacctgggacagctggggacagactcacctgcctgcacgtgggtcctggggcccagactcagccctggaagagaattccctgtgaggcatttgccctgaagcctgagcaggtcctccccgccctggtgcctcctgagcttttgaggtctcctgatggaccagggcttgtgtgtggggtggggttcctccaagactcagatctccccctccccatcttgaaatctcacctaggcagagcagggctgcgagggtgggggtcatggcgtctcctcctggtgaccccgggctctgcagagggatgagccctcagtgctggcaggacagagagacacacagggtgtggccgctcggaggctgggtccttcttgtcatggggttgtctcatcctcagcccacaggaagaggaactgccaccccaggaacctggctctgatttccccagggctgaagtgggggcaggcaccaggctctctgcaggcatttcagagagaaatggggtctccctgcccccgggccactgtctgcctgatttatctttatctcactgagagctaggacacagcagcaaatagaaccagtgccttctggagtcagcccctttgaggcgagggtgactgtgggctcatcctccctctcagagcctccccatggggtctccctccctccttcagcccgtccatcagctcagcgttacggggtccttaccatggcagtcgtctctccagccctggagatgcttcagggaagacccaggtccatgctgcaggcagactcagatcagcagagacgcacctgacacctggctgtgtagtccaggctgagctgcgtgtagcagtgagcacagaggagaaatgcagcgtctaccgtggtggctcatgcctggaatcccagcacttcaggaggctgtggcgggtgatggcttgaggccaggagcttcagacagtcctgggaaacagactgtgaccctgtttctacagaaaagaaaaaagtgagctgggcatggaggctcatgcctgtggtcccagctactcaggaggctgaggtgggaggaccacctgggcccgggaggcggaggctgcagggagatatgatcaccccttggccttccagcctgggcgacagcgcaggatcctgtctgaaaaggagaaatagaggggataaagagaaatatatatatatatatatatatgtttcattgtaatctataatctgattctggggaaggtgagctgatttgtatttaattcctgattatcatctagggtttatgagactttggacatgaatgtcacctctgagcctgctgtcgtgaaccccactcatcacagtggctgtgggggtcagtggtgcccaggacatgggaggctcagccatggtgaatttccagaccagttcagacaggagggtggggacgggagaggatcctggtgctgggctccacagttgaggaggatgattgacgcccccattcaagagcccacattggctccaaataccatgaaattcttgtgatacgtctgaaatatgcagatcatcacagccacaggccgagaaagaggaagaacagttcctcacattgagacgcatccccttccatgagcagagttcaatgctgagtggccacaggtgtctgggaccaccgagcgtcattagggaggaggaggctcccacctccatgtgggacagaagaggaaccccacgtcctcccaggcagggaggggtcagggctctgggtgaggctggaagcggtggctccccctcccctgtgtgtgtggacaggcgctggggggtctctgctcactcactggaggccacggtcagcgctcagcccctcccctgtgtgtgagaaacagattcgatccacggtggtcagacatgggcgtctgccccacaggtgagtgtgaggctggcgttggtcccatccctgctgggcacaatcttgagctgacactgagtttgggggagtggggcaggagcagcggcaacaatccccttcatcaggctgatgcctggacagccgtgggagaaaccctttatgaaaggccaggtgcgtgggaggagctgtcccacaggaatgacaaccaagatacgtgaggaaaacacagacagttgttgaaatgcattagacagacgtcgtgaaggtgaaaaatagtaaattgaattaataccatcgaaaagtaatttaataaatatatacacctactatgtagccataaagtgaaaaatttgaccgggcgtggtagctcatgcctgtaatcccagcactttgggaggccgaggtgggcggatgacctgaggtcaggagtttgagaccagcgtggccaatatggtgaaaccctatctctcctaaaaatacaaaaacaattagctgggtatggtggtgcacgcctgtaatcccagctactcgggaggctgaggcaggagaatctctggaacccaggaggcggacattgcagtgagctgagatggcaccactgcactccagcctgggccacacagcaagactctgtctcaaaaaaaaaagaaaaagaaaaagaaaaaaagaaagtaaacaacttctaaagcgattcaagcaccagaagggttcaaatgaaaatgagaccaaaggaagtaaataaaaaagaggagggaatttgtgagaacacattttaaagggtccattttcaaggcatgatatccaagtattggcagccagtctgcggatgtaacaaaccgcacggctcatgctcctagcaaatcacaataagtgaacagaatggcggggggttgtgggggaggaggcggtcagcccataaaagggaaaaaaattttgttattgggaaatcgcaacttaagcggggaaggggacggggtacaaccttataagggggataatgaaactcaggcgaagtctgggaagattgtaacctcatagtactcgaccagtgaggaactggggaagggatagttgagtgccaagagataaattacctgctgtgactgccccggctatgcctacctagcagacatccaattttgcaagaccctgttaaaagtctcactttcaggcgggacatggtggctcacgcctgtaatcccagcactttgggagtcaaggcgggcggatcacgaggtcaggagatcgagaccagcctggctaacacggtgaaaaccgtctctactaaaaatacaaaaaattagccgggcgtggtggcgggcacctgtagtcccagctgctcgggaggctgaggcaggagaatggcatgaacccgggaggcggagcttgcagtgagccgagatcgcgccactgcactccagcctgggtgacagagcgagactccatctcaaaaaaaaaaaaaaaaaaaaattcgcagcagggtctgctggggcaaagcaaggggttcgtctcctggtaagtttccctgggacctctcagtaccacctccccctgtcctgctcccagtgggactgctgagatctagggagcgggtgtgatgtccctgaggttccacagtatgaagtgaaccatgttcccctgagccccagacccttcccagccccttcctgttactagtgaaactgcagggtccccatctgcaccccaggtgcaccccctcttcctcttactcactgaggttttcttcttggatgtcagcagctgggctggacctgggggaggacacgagagtgtggtgtggtggagtgtgggagtctggggtctttgggcagaattacctcctcagcagacccctgttcttgggctctggtcccacggcccctgcagggtgttggaaatcagcctctctctgggctaggtgaagaaggacaaagtctcagccctgggaaccttagaaccacccacccagtacatgcgactttaggggaaaaaatgaaacttgaaaacacacccatatatatatatatatatatatatatttttttttttttttgagacaaggtctcgctctgtcgcccaggctggagcacagtggtgcgatcccagctcactgcagccttgacctcatagggtcaagtgatcctcctgcctcagcgtcttgagtagctgggaccacgggtgcacaccaccaaacctggcttatttgcatttttaattttttttgtagagatggggtctcaccacattgcccagagtcctctgaaactcctgggctcaagccatccacctgcctcagccttccaaagtactgcgattacaggcatagttgttttaaatactggatacacttaaaaaggcccgaagacgttgggccgaatggctcatgcctataatcccagcactttggaaggctgaggcgggtggattgcttgaactcaggagtttgagaccagcctcggcaacatagtgagaccccccatctctcccccgcaaaaaaataattagcctggcgtggtgataggggcctgtagtcccagctactcaggaggctgaggtaggaggatcattgaggatcttgggaggtggaggttgcagcgagccgagatcacaccactgcactccagcctgggtgacagagccagatcacgtctcaaataaaataaaataaaaagctcaaagaataaattacttgcacatacactcatatttattctcttctttctagatttttcagctgggactttctggagctgtttttctaagctgactttcttgtgtgtttggttcccctttggttggtgccctgatcccaccctcggtgggcccacaggttcccccagtccctgctcacccaatgtcctgtgtttgctctgacgccgacattggaggaggaggacgagcggcaggacaaaggccactgagaccccggttacaacccccaggtatcttcccagaccttgcgcgtgatgacgtcgggaatgaggatgacatcgctgatgtgagcacctactgtgtgcaggcgcgtgctgggtcttcatgagctctaaccctcacagcagtcgtgcaacgtgggattgccaaccccccaacccatttcacagatgcacaaactgaggctcagaggggggaatcgcctgccccaggccccccagcctggaagaagcaggtctgggaggggaacctgggaccttgtgttttccccagctgtcctcctgctgccccaccaggtggacacctgcttcctgctctgggtcttctcatctgacagcaggggcctgtcttagtgtctccatctggggctgtgtcctccttacaaccctcccttccccagcacagcagggcctgggggagggagtgggctgtacaggacggaccctgcattgctctcacccccagcccagccaggtccatctcctactctgccaatccctgaccttcccatgcagagcctttgaccacagactgaagggctgcactgtcggcttctcggcttctgaggttttggtactcggactagcttccttgctcctcagcttacagacagtctattgtgggacctcaccttgtgatcgtgtggatcaatactccttaataaactcccctttatatatacatctatcctgttagttctgcccctctagagaaccctgactaatacatgtttctgaaatacgcagccatagaaggaaatgagaaatgaaacttcctgacacaggcaggaaacctcaggaagcagcgaggtcagagctgagttggcttctggtgacttgcaatgtcagggaatcactaaaagggaggtttccgcctctatatgagacagaggagaaccccagggccctcacagtcagggaggggttggggttttgggtgaaagtgggaagttgtggctcctcgtcccctgtgtttgtggatggcactggggtatctctgctcattgactcaggtttatggtcagccctgagcctccccctctgtgtgtgtgaaatagattcattgtagagttgtcagacatgaggttcacactggaccctcccctgctggttacaggcctgagcagactcacaagacccgggcaggtggtgccgtcctcctcttttcaagcctaacgcccagtgcagccctggtagaaaccctctctggcagatgaggcactgggagatgagtgtccaagaatgagaagaaagaggaatcatcctaatgataaaaagtgctatgactggctgcctgcgatggctcacgcctattttcccagcgctctgggaggccgaggtgggcagatcgctggagcccaggagttcgagaccagcctgggcaacatggtgaaaccccatctctactaaaaagacaaaaatgaactgggtgtggtggtgcacacctgtagttccagctacttaggagcctgaggtcgaagatcgcttgagtctggcaggcggaggttgcagtgaactggggtggtgcgccactgcactttagcctgggtgacagagcaagaacctgtctcaaaaacaaacacaggctgggcgtggtggctcacgcctgtaatcccagcactttgggaggccgaggcaggcagatcatgaggtcaagagatcgagaccatcctggccacacggtgaaaccccatctctactaaaaatacaaaaaaaaaaaaaaaaaaagattagctggttgtggtggcgggcacctgtagtcccagctactcgggaggctaaggtaggagagttgcttgaactcaggagacagaggttgcagtgagctgagatcacgccactgcactctagcctgggtgacagagtgagactccgtctcaaaaaataaataaataaataaataaaaacaaaaaacaaaccaaaaaatcaaacacaaagtgctatggttgacaatccacactcactaatgaggattatcatggtcaaaaggagtactaggaatgtgtgagacccatcttaggttaaacatgtttaaatatttgagaaatacagaggacattgaatttctgaggcaggattatatgatttttttttctacagcagaatgaatattatataaaataattagaagacatagaaaaatcagatttaatgaacacaatcaaaatactcattccttcgaggacaagacacagtgaagcaccaattatgaaattagaaaacaaaacagaattttttttagagtgtagcatagaaactttataaattgcaatttaaagtacttgggagaatagaatgaggagggggaatgtcctatctattgtaggcgtcagaaagaaggaagagaaaacgatgtctagcaatagcccaagaggtgagtagctgaacattttatagagatgaggagagactaactaaggactagggcgcatccctttaaaattgaaatgtatgggctggacgtggtggctcacgcctgtaagcccagcactttgggaggctgaggcgggcggatcacctgaggtcgggagtttgagaccagcctgaccaacatggagaaaccctgtctctactaaaaatacaaaaattagccgggcgtggtggcaggtgcctgtagtcccagttactcgggagactgaggcaggagaatcgcttgaacccgggaggcagaggttgcagtgagccgagatcactccactgtactccagcctggtgatagagcgagactccgtctcaaaaaacaaaacaaaacaaaacaaaaaccctcacacaaaaaccaagacaaatccccttgacacaagtttatctgtctaacaaacctgcacatgtatccctgaacttaaaagtgaaaaaaataaaggcaatatgtgtcagatttgtggtggtgtctgctgtttcacccccatatggaaatgtgtgcctgaaccccgcttttttccttgcttattgtggctaggatttgtgaatgtaattcacattctcaagaatgagcttttttggcttcatcgagttttcacgtagccctcattagtaactcctcttgttatttttgtccccttcctcacaccttcatttggaataatttgttgttctttttctaaattctttctgtcattgccaaggtcattaattacgtaggttttattcttttctaattcattcgctcatttgtagttttccgatttcatcatttaatgtgtaatatttacattatcattccaaatttataccatgctctaatttctgtttcagttttctcagctcattgatttattgagaagtctgtggcttcatttcaaaaatgcaaggatattagtcatctttgactgcagaatctagtgagtcccagagttcccaggatgtcctggtggtctttgttaggggtccaggctggctggggttcattggtgtccactgggggcagctcctgtgccttctggagtctctgagtctccttctgttgagtatgagatctgggtcccccgtgggctagtggatggccaggggggcgtagatgctgggttcagctggaggttccctttcctgggatggaggaggctcagttgcctcccgtctgagggtcaagctgtgcagctgggcgtaggtcacatcctggggggcttcagatgcagcagcctgcagcgggggagagtgagagggaaggaacgtggtgggggtgggggaggcctgggggcctggagaggaaaggactctctcagtgtccatctgtctgtcctcttctgcctgtctgtcctttgtgtccaggaattccccagacagtggggaaggaggagaggccatttctctcctaggtctggagtgtttcaccggggcatacgtcactgcctgggggtcttcatcgtgtgggctctgctggagagagacagtggtggggggtgtccttgagtccccctgacctcctggagtcaattttcctcactgttcccggggtgatccgattacatccctttcctgatggaatctcagggacgccctaaggccgtggagggtctggccgctccctccctgtggttctggcctctgctcctcactctgaccttgcccatttggctgcagcctcacgggccttcccgcaagagctcgctgctgcctcggggcctttgcacggctgtttcctctgcctgcaggggctcgtccatcagaggatcgtgtgccccactctgtccaggcttctcagatgacagctgagcagacagccctccccttccattcagactggccccactgccccacactctctgccctttccctggtttatgttccttacagcacgttgcactcctggacacgatgcatttatttgcattttgtctcccaccatgaggtgagctcaggaggcgggggcggctttgctccctgctgtgtctgcagctcccatggggagccccatccacagtgagctccctgggaacactcgctggttgaatgaatgaaggggagcctgggggaccgggtcggttcatttattcctcatcctcctgaggcctggggagagctctaacaaccagacggccaaacagaggatgaggagcaggaaggggacccgggaggaggcccacgaggtcccaggacagcagaagagagtgaggtcgcagcaggcgggaggcagcgtgctggacaaggaggggtccaccgtgacgatgctgagagccgggggaaggaggacagagaagtcctgctggattagatctggcaccaggaggcctttggtgcccgggacaggggcggggcctcaccggagcatccatctccaccccgtccttgggctgtgtgtccttcacggcagcatctgctgggccagagcaaggggttcatctcctgggaaggttctctgagacttctccgtcctgccagcccttgccctgttcccactagggtggctgagatccagggagggactgtgatgtccctgaggtcccacagtgtgggttcagaccgcctcccccttggccccagaccccccccagcctgtgctcctgcccccattgctacagaaactttggtgctcccttgcccaccccaggtgccctccgcttctagtcactcactgagaatttcctcctggatgtcagcaactgggctggccctgggggaggacacgggagtgtgaggggcagtgagggggctgtgcgggtggatgggagtcttgggtcttcatgcagaattacctcttctgcaggccctggtccttgggctctggccccgcagcccctgcaggacggtagaaatgggctggacagagatggacagagggtcaggcctgggagaattcgaaccagctgccctgcacacacaactcgagcggaaagaaggaaacctggaggcccactggcactgaggctttaaatacgtcgtaagtttaaagtaaaatcagaagaatcaagcacttccacacatgctcacatttattctcttctttctcgatcgatttttcacctgggaatttctggagcagtttttctaagctgactttcctttgtgtttggtttccctctggctggtgccccgagcccaccctcggtcggcccacgggttcccccattccctactcacccgatgtcctgtgtttgctctgatgccgatgtcggaggaggaggaagaggaggaggaacagcagcaggacgaaggccactgagaccccagtcacaacccccaggtgccttcccagaccttgagcgtgatgacgttgggaatggggatgacgtcattgatgtgagcaccttctgtgtgcaggcgcgagctaggtctttccttcatgagctccaaccctcacagcagttgtgcaacatgggattgccaaccccccaattcacagaggagcaaactgaggctcagagaggggaatcgcctgccccaggctcctcagcctggaagaagcaggtctgggaagggaaccagggactttgtgttttccccagctgtcctcctgctgccccaccaggtgcacacctgtttcctatttgacaggaggggcctgtcctagtgtctccatctggggctggtgtccttcttaggatcctcccttccccagcacagcagggcctgggagagggagtgggttgtgcaggacggaccctgcattgctctcactcccagctcagccaggtccgtttcccactctgccaagttcccatactcccatgcagaacctgtctggataggggctctgtgtgtatctgggaagggctgagggtagcaggaggacggtgcccctgccgagctgtgtacagggccaggtcccatgattttgcttacgcctcgcagcagttctgtgagctggatgggactgagccagtttacagctgctgaaactgagtcagagtagaaagttgacctgcctgggcccacggtgggatgcggcagagctgggaagtgaacccaggagtctgacccgcagcccttgttctctgcacctgagcggagccccggagctgcagggaaagagcctgaatgccccaaaccacggccctgctcccctcccctgccccaggtcaccgtcactgctgccggtgggacaggacagtcccctgaagaatcccatcaatgcaggcctctctcctttacacttggagaaactgaggcccaggcaggggaagggcttgtgcacttcaccatctccagaggagcctgaacctacgacagaacccacccctgcctcccctggtctccgcccacctcccactcagagcccctcactcaccactctggggatccaaccccgtgggggtgaggggctggtcctcagggcctgctgggtcaggacggggaggtgagggctggggctgccctgctccccacatcagcccggctgctcctcccccaggctgggccccaacacccaacatctctctctgcctcgacgcccgccccctcaccggcccagcctcagagccccggggagcctgtggcccctcctctggctctgcccagctccctggagggaagctcccgcttgagtctttgaggggaataggatcctcggggagactcagggctgcctggggggagaccacgctccctccgagcccagaggcctcagtgactcaccaggtgtgggggtggagcctgtaggtgagaggctgggatccccagagggtcctgggaataagcacagaaagggagcgaggcgctttggtgctgagtgaggaaacccgtccctccacctgcccgtggcttctctggaaactttcttctgctcacctttcaccatttgcatcccaggagatggggccaagtgtgggcatgcctggggagcccccgttgtcctcctcccctctgaggggtgagtctccctctggctgagcccccctcaaaccctcccccccgcaccgcgactccatcccagcccagagctctcctgggggcagggcctgagctgagcctttgagcttggacaggacagggtcagggccctcacctgagaccacgagctcctgggggtaactagggctggacagcaggtaggggtaggacctgattgcgctgtagcatcggtaggttccaccctgggctgaggtcacaggactcatggagaattcagcctggtgtctataagactggtactttgactttagacacagcgggggatgggctgccccctccttggtcaaaaagaaagtgtctatctgatgccatgactgacacagcagggtcacgttctctcctgaggccaccttggggcccggctgcaccgagagggcgggtatgtcagggatcagtcctggagagaagaaggatgggtgaggggctgccccaccttgctctgagctgagacctccccaggcctctctaggagcctctgtctctgttttctctgagtcttcccctccccacccatcccctgtctctgtctgtctctccctcccttgggaccacccccccgcctcatcccggccatcactaattggattcccccggcaggacctgtgcagagcctgggtccctgactgaacccgctgggctcctcacctgcgatcaggatgtccagggggtcgctgggggccgaccacctaggggagaggttgtgtgcaccgtagcatctgtactggcccccgtgggagcggctcacagggcccagggtgaagttggcctgggagagcccagcctggggctgctggccagagccctggacgaggtcatgttccccctccttgtacagaacgaatatgtcatagccgacatcagagcgacactgcagggtcaggctgcctccgcgggccacgacagagccctgcgggatcaggagggagggcttcctagacacgcctggagggaaagaggaattgggacttggaaggctggttcctcccccgccccttccttctcccgtcctggcgtcctggccctgcaggtctcactgtctctcacgctctgtgtctcggatcccggggcctccttctcacctgggtctgtcttggagtagttccagaccgatagtgtctctctgactcctggccactgtctgtctggtctgtcctctcctcattgagggacaggaaattgcagcaaatacacccattgccttcctgagtcgaccccttccaggtgagggtgactcaggctcctgtttccccatctgagcctccccgtggggtcttcctcacgccttcagcccatccatcaacacatccttctggggtccttgccatgatcagtcatcaaccaaactcccaacaacctatctggttccccaaaattatataaagaagtgtggtggctttttcacctgggaccagaatctccaggaggtcactggggttcgaccacacctgagggtttttcctgtaatagtaatagcatctgaacctccacctgcagctgggggtcacgggacccacagggaacagggcctgggatggccctttggggagcttctgtgagtacagggtcctggggagcttctgttcttcctcaacaagaacaaacgtgagaagtccgtccagtgtatcacactggagggtcacatttcctcctgaggccaccacaggactcggcagggctaaaagagtgggttctgcatagaatcctagcagagaaggaggcacgtcttaagtggggctccgacctcccacatcatccccagggctgggctgtgagaggtagacgtccctaagagccgaccctcttcctgagggcagagcctggggctgggacccctgagtgtcctctcacctgtcgccaccagctccagggggtcactgggctctgaccagcctgcaggggtctcatagtagcagcggtatcgccctgcactgtcatacaccgtggatggaatgtggaacttggccttggctccaggctccagtgggttctgtctcttccgggcccatgggagtccctccttatccagacggtactcctcagtctccaggggcccctgacaccagagggtcacgggcttcccccgagctatcacagaggctggctcagcccagagggtgggtttggggagggtgcctagaatggaatcagaggctggatcccaagacatccccatccctcagattccagctctcagccccaggaccctccagacgtccccatcagtcagcccagaacagctatctccacccccagctgcccggggttgggcccttgtccccagtgagaagaagggacctgggacagctggggacagactcacctgcctgcacgcaggtcctggggcccacactcagccctggaagagagttccctgtgagggatttgcccctggaagccccagcagttcctctcctccctcggagcctctgatagaccagattctctgatagaccagagcctcgctttagagtgagctccctccaagacggggaccttccttccccctcttcaaacctcaccgaggcaaatcaggactgagagggtgagggtcatggcgtcagctcccactggactcagctgtgcaggcggatgagaccacggtgcctggcaggacacaaaaacacgcagagtgtggactggaggctgggttctccctgtcacaagactgtcccatcggaagccccacaggaaggggaactgccctccccaagagcctggctctcatttccccagggatggggctggggtgagctccaggctctctgcagacatttcagacagaaatggggtctccctgagccctagccgctgtcggcctgacctatactcagctcaccaagggctagggcagagcaacaaaacccctccgctgggaatgaacctctaagtcgttcctgcctcctcagtgcccctttgtccttggccgtccctctgtgcctccaaccatgttcaaggttttcagaacaattactcaggtttgtcatctgattcatggggtggagtggggagctgaattttcttcctaattccaccgattatgtgaccttggacagcaaagtggcttgcttgagcctttctcttttggaacttgtggtcatgacctcagcttctcagagtggatgtggggctcagtggtgcctgggacatgggagggggcttggccatggtgaatttccagaccagattaagacaggagtggttggggtgtgagaggatcctggcattgagctccgtagtagaggaggatgattgatgccccaactcaagagcccacatctgctccaaataccaagaaatgctccttatgtttgaagttcccggcacggtggcccacccctgtaatctgagcacctagggaggctgaggatggaggatcccttgagctcagaagttcaagaccagcttggggaacatagtgagaccccgtctctgcatataacaaagaagaaataatcaggtatgtttgtgcacgactgcagtcccaactatttgggacactgaggtgggaagattgcttgagcctgggtggtccaggctgtagtgaggtatgatcatagcactgcactccagcctgggtgagagagcacgaccctgtctcaaaacatacatatatatatatatatatatatatatatatacacacacacacacatacacacatctgaaatatgtagattatacatccgaaatatgtagattatgaaagttttgtgcagaaaaagaaatgaaaagttctttaatttgagaaggttgcacatcaaagaacaaacttgaaagctgacagcctgcttgtgtctaagactgtcccagggtcattagggaggaaatttccacttctgtgtgggacagaagaggaaccccaggtcctcatggaaagggagggggtaggggctccagatgaagatgaaaagctgtggcccggcccggcgcggtggctcacgcctataatcccagcactttgggaggctgagatgggcagatcacgaggtcaggagatcgagaccatcctggctaacacggtgaaaacccgtctctacttaaaaaaaaaaaaatagaaaaaattaagcgggcgtggtggcgggcgcctgtagtcccggctacttgggaggctgaggcaggaaaatggtgtgaacctgggaggcagagcttgcagtgagctgagatcgcgccactgcactctagcctgggggacagagtgagactccgtctcaaaaaaagaaaaaaaaaaaaggaaaagaaaagctgtggttcacccttgctcgtgcttgtggacaggagctgggatatctctgcccactgactgaagtccatgatcagcatggggccacctctcccgtttttgtgtttaacagattccgccgccgtgcgtggtgcctcacgcctgtaatcccagcactttgggaggctgaggcgggcggatcacctgaggtcgggagtttgagaccagcctgaccaacatggagaaaccccgtttctactaaaaatacaaaaaaattagctgggcgtggtggtgcatgcctgtaatcccagctacttaggaggctgaggcaggagaattgcttgaacccgggaggcggaggttgtggtgagacgagatcaagccattgcactccagcctgggtgacaagagtgaaactccatctcaaaataataataataataataataaataaataaataaataaaatccttgaagtccacccggcgttctattgcactgcagctgacctggcactcaagccacaagatactgtccttcctactcatccctcccctttcttaaggcaaaggagcctcatgccatgaccactgccacaacaggcttacagggagaactgccagtgttctcttaagccctaagggatcttcagtcagcttgtggtgaaggcttcctggcctgctattcatccgtcatgacactgggctctgcccaggcccagggcaggtccagaaatgatctctaagagcaaagtccttgaattgaggacctgagagcctacttggcactctatcccctgttgttgagctggtacctaaggtgcaatacaaagtcccttttactttttcttccacttttctcaccccacagtcaacatggctgggaaggtgctgagtctcacttgaagccagcaagtctcagagtctcacctaaggcccacgacatagtacctgtatattgctgctggttattcagggcctgagagctcttcagttagcaagtgatgaattctgccaggactaaatccttccccacaaggcagcaatttcccttctggcctagggtatgtggaaaaatgttgtccaggagctagcatctgggatggggacctcaggactctgcctgttgccctatcttactgtggctgagtgggtatccaagataaaagacaaagtcctctttattcttccctctcctctcttcaatcagaaggaaggaatcacttttgttgctacaagttgtgctgccttgggtagtgggaaggatgaaacaagtacacccttagctacgtttgctgatttctctaaattcactggctccaaactcagcacagcactaggattttcccaggaatcacagtacttgtggcctagactctttcaagcttgtttaagaccccagaccaggcgcagtcactcacacctgtaatctcagcactttgggaggctgaggcgggcagatcatgaggtcaggagtttgagaccagcctggccaatatggccaaatcccatctctactaaaaatacaaaaattaactgggcatggtggcacgtgcctgtagtcccagctacttgggaggctgaggcagtagaatcgcttgaatctgggaggcaggggttgcagtgagccgagattgcaccactgcactccagcctgggatgacagagcgagactccatctaaaaccaaaacaaaacaaaaaaacaaacccagagcactttagcctgaggtctcaggtgggacttgctgaatctcaagttccaactgattttctgggcagttcccctttgggtagagctcatcaaatgctttctccatgaacgggcatcagttgcaatcagcccagtgtggctttccagtgtgacagggcagcattgagttcagtcctgccttctcccttccccaagcacacagtcgctgcttgggtgactccagcctgggtgacagagcgagactctgtctcaaaaaaaaaaaaaaaagaatgctgaaaatataccctaatatctttaatatcttctgacttttagggttatgctgaaaggttcactgttagcctgatgaggtacgtcttttggatgactggcctattctctctagctgccatgaataattttctttcacgttgatcttggagaagttgatgagtatgttgtttgtggatggttttgttgtatagtatctcactggggtgttctgagtttcctaaatgtgaatgttggctctctagtgcggttggggaaatttttattgataatattctcaaatatgtttctcaagttgcttgcttcctttcttactcagggatgccaatgggtcataggttttgtctctttccataatcccataattctcagaggttttgttcattcttttaaattctattttttttatttttgtctgactgcgttgattcacagaagcagtcttttttaattttgtttttatttttgttttctgagatggagtttcgctcttgttgcccaggctggagtgcaatggcacaatcttgactcactgcaacctccacctcatgggttcaagcaattctcctgcctcagcctccctagtaactgggattacaggcatgcaccaccacgtccggcaaattttgtatttttagtagagatggggtttcaccatgttggtcaggttggtctcgaactcctgacctcagttgatccgcccgcctcagcttcccgaagtgctgggattacaggcgtgagtcaccacgcctggccatagaagcagtctttgagctctgagattttcttctcaccttggtctattttgccgttactactttttattatattatgcaatttttgtaatgagtttttcagctctataaaatcagtttctttctttcttaaaatgtctatttcatcttccacctctggtgtcattttactgggttccttatatcccttggattgggtttcaactttcttctgaacctcagtgatcttagtttggcatccagattctgaattctatgtctgccattttagccatttcattaaaaatcacaggatggccacgtaataaatgaaagtagcactgcacctctatcaccccatccttcagtcaggatcagcttggaataaagagggacttctccttgctggaaaaagctgagaaaaagacctagcagcttccatcaacactttggacacctgtagatctcaccattggagattccctttcacagacactaagcacagctgacggagctacccagattccacacagctgcactcacccaggagaaaagactgacactgtgccccactgtccacggccatcacggctctggcactatgccattgtggaatgggatctacttctggatctctgggggacacgtagccgcagcatcctttcactgctgagggattgtcactgctgagccagccttgcctggtggcctgccatccccaggctgagctgttgctctacactaccctgtcgtgccaagctgcctagagccactcgatccacctttcccagtggcagatgcatcctgaccctcagggaccgagctgaagtggaaacggtgccttgggtgttcacaagagtgatggcctgtgcctgcgctagtgtgacacgctgtgtattagggttctctagagggacacaactaatggcgtatatatgtgtgtgtgtgtgtgtgtaaaatcgtatctggtgtatatatatgtgtgtatatatacacatgtcaaaaatatatatgtatatgtgtgtgtatatatgtgtgtgtatatatgtgtgtgtatatgtgtgtgtatatgtgtgtgtatatatgtgtgtgcatatatgtttgtgtgtatatatatgtgtgtgtatatgtgtgtgtatatatgtgtgtgtatatatgtttgtgtgtatatatatgtgtgtgtatatatatgtttgtttatatatatgtgtgtatatatatgtgtgtatatatataaaatcatatctggggtatatatatgtgtgtatatatacacatatcaaaaaatatatatgtatatatgtgtgtatatatatgtgtatgtatatatgtgtgtgtatatatgtgtgtatatatatgtgtgtgtatatatgtttgtgtgtatatatatgtgtatgtatatatgtgtatgtatatatgtgtgtgtatatatgtgtgtgtatatatatgtgtgtgtatatatatgtttgtgtgtatatatgtgtgtatatatatgtttctgtgtatatatatgtgtgtatatatatgtttgtgtgtatatatatataatcgtatctggtgtatatatatgtacacatatcaaaaaatatatgtgtgtgtacatatatgtgtgtatatatatgtgtgtgtatatatatgtgtgtacatatatgtttgtgtgtatatatgtgtgtgtatatgtgtgtatatatataccctacatatatataccatacatatatatgtatatacaccatatctatatgggtgtttattaagtattaacacactattatacaaaaattagcctggtgtgtgtgtgtgtgtatacatatatatatataaaatcatatatgtgtgtatatatatgcatgtgtgtatatatatgtgtgtgtatatatatgtgtgtatatatacacatacatatatatgtatatacaccatatatatatgtgtgtgtgtatatatatatatatacgagtgtttattaagtattaactcacactattatacaaaaattagcccagtgtggtggtgcacgcctgtagtcccagctactcaggaggctgaggcaggagaatcagttgaacccggcagacggaggttgcagtgagccgagattgcgccactgcactccagcctggtgacggagtgagactccatctcaaaaattggactctagcctgggcaacaagagcaaaactctgcctgtctcaaaaaaaaaaaaaaaaaaaaaaaagacatgatccaggcaacatcgatggggcatcaccagggtctgtcctgtctgttgcagtccacactttgccctgctcatagccccatgaacttcatgttcatgtcttttcacactataacttcttccaggtctttgctggacacattaaaaaaatatatatatatataaaatgcttcatgaaatttgttaatatccttgtgcagctgccatgctgatcttctctgtatcattccgattttggtatatgtgctgccaaagcaacaacacactggacacatttatctacaaatgaggcaaacaaagcatatgggtgtgaatggggagaagtacagtgttctctgttgtaattgaccccgaggtcatcctttatatttaccagctttgctgtctatcaccctctctaggttctgcttaccttctgccagagttcgcatgagaaactctacttgtctcaactatcggcccaatgaaataaacataaatttcaaccttgaggcatctgagcacctgattattgtgcctgtttcaggctttcttgtgggagttgcccattgtgttagtttcttggaggctgatataacaaattatcacaaagtattgaataaaaagaagataaacttattctctcagagttctgcaggccagaaataaaaaatcaaaatgttcatataatttcttctttctagaggctctgaagaagaaacttctgtgctttttccttctttctttctttcttttttttttttttagatggaatctcgctctgtctcccaggctggactgcagtagcgcgatctcggctcactgcaagctccgcctcccgggttcatgccattctcctgcctcagcctccccagtagctgggactacaggtgcccgccaccacacccggataatttttttgtatttttagtagagacggggtttcaccatgttagccaggatggtctcgatctcctgacctcatgatctgcccgcctcggcctcccaaagtgctgggattacaggcatgagccaccacgcccggccacttttgtgcctttttcttagactttggtccttgctggcatttcttggcattccttggtttacagacttctcattctaatctctgcctccatcttcacatggcatcctattcttctctgtgtgtcttcttcatgtcttataaagatgtgagcaatattggatttagatcctgcccgaagccagcatgaccacatcttaactaattatacctgcaaagatcctatttccaaataagttcatattcacagctacgggaggttaggatgtcaacatacctttttggagacacagtgcaaaccccaaccccagtcatggttacctccagctatggagaattcatcactgccacagtgaattatctaagctgcccaaccaccctctcttcaccaaatcctcctcctcatcgttaaagaaaattacccaggccagtatgatatctttctccttacctgctgatgtactgtaatgaggaaacccaaggaaaaccagctacatcatcattttaggtacagagtaatttttgtgttgttccctggtagtggtttcttaccaggcagatcttctaacccagggtcacctaaaagtgcagtcacaggatgtgcacatctcccaagtgtgtcatctgtaaagttagtgatagatgctgttcattaaactctcactttactcccaagcccatgcattctacctgtcaaaagacataccatgatttattgttttatttattttttattattttttatttttttgacggagttttgcccttgttgcccaggctggagtgcaatggtgcaatcttggctcactgcaacctccgcctcccgggttcaggcgattctcctgcctcagcctcccaagtagctgggattacaggcgagcagcaccacgcctggctaatttttgtatttttaatagagatggcgtttcaccatgttgatcgggctggtctcgaactcctgaactcaggtgatccacctgccctggcctcccaaaatgctgggattacaggcgtgagccaccgcacctggtccatttattgtctttatagctatatctgtatgtatatcatctacagctttctgtatgcttatttacagctactgtaacagaacccccaaactgcagagtctcattcacaaactgttcaatacatccaatttcaagaggccatttcaatgttctttcagtcccagtaaaaccaaaccactgcatagtacatatctcaggtcattcccagaatatcacgtggccatgttctcattccctccacggattttgtgggcatctggattcccattctgagaataagtcatgggttatttcgtttaaacaagtcagacattctgagtgctcacagacccctgcgaggagctccgtcaaacccattttcagcacaagcatccttcagactaaggaaggtttgctgccccctcgtgggtggaatgtgttccatggcatcaagttactaccaggcatcacatccagacctctctgctggtcacaggtgagactttcagctacagtggtggctacgtggtccttggtgagagggagtcactggtgttgggttcatgcatgtcctcctttcttgctccatggctatcccattcacgggcccctcctgcttgcattgggcctgctgaccccacagctggatggattccactgcatcaattctgtactccacctggtgcctcccccagctgtggactgctcttgcttgcttctcagggataggctcatggtagggagtataaatttctcctgtcctcacccagcctcagtcttggacaatttctatatgagtgggccttgagggtggagcttgctcagtgtttgtgtccttcttccccttggcagctggattgtacttggtagctttggttgacttgggcaggaatttcctgtcccttccctgacatttgtatatctgggattatggtttcaggaattttctgcagtactcctagggatagagggacttttaaatctaccttcttatatccacaatgggtttttacctggggcctgagattggctggtttttctgaacctctctcaatgacttcagtctttttctacacatgggagaagtatctgggcagggggtgagatttcaggccacacactgtggaaggtaatcatgtctgatcacaaattttgggtctccaccttacttccaatctatgttgtgaatgcccagttgagacccacggaaaagagctcatgggtgagtgtgaagtgcttctctgtcttaagttcccagagatccttgcctcttggaggccagcaaacactaactcttgaggaattcatgacaatatcatctgattcctccttcccagcttgtatggcagtctcccaccctcatgtgttctgcctttgtagagcctgtcatggcatcctactcctccttggaattcaggttactcagttgctcccagagctcggatttctgatggtctcaggtgaaatctacattatggagttgatctgagttttactcatggttaggattgcagagaagctctttttttggagtgggggagggagggggagggatggagtttcgcttttgttgcccaggctggagtgcaatggcgtgttcttggctcactacaacctctgcctcctgggttcaagtgattctcctgcctcagcctccccagtagctgggattacgggcatgtgccaccatgcccagctttttttttgtatttttagtagagagagggtttcactatgttttccaggctcgtctcaaactcctgacctcaggcaatccacccacctcagcctcccaaaatgctgggattacaggtgtgagccaccgcacccagctagtgaaactctttccagctccccaaaccctgggcagaagccgggatatgaattatttatttacttactgagttatgtgacataactcacaccatatgaaatgcaccattttttagtgtacaaataaatggattttagtgtcttcactatgctgtgcaatcaccatccctacctcatcccacagcatttccatcacctcagaaagaacccccaagtagtcagtcctagttcttcccttccctcagccttaagaaatcactagtctactctcagtttctatggctttgtctattctggatatttcatgtgcataaaatcacaccaaatacacgtccttttgtagctgttgatggaaaagaagtggttaccatgaaggaactgaagttttccaaagacaaaattataatgtggcctgacagaagaagtacagaaattgataacaaaaacaaatccatcacaacttatcatgaatctggtcatgccattattgcatattacacaaaagatgaaatgtctatcaacaaagctacaatcatgccacaggggccaacatttggacctgtgtccccattacctggtgatgacagatggaatgaaaccagagcccagctgcttgcacaaatggacattagtatgggagcaagagtggcagaggagcttatatttggaattgaccatattacaacaggtgcttccagtgattttgctaatgccactaaaatggcaaagcagatggttatcaaatttggaattagcgaaaagcttggagttatgacctacagtgacacagggaaactaagtccagaaactcaatctgctattgaacatgaaataagaaccattctaagggactcatataaatgagcaaaacttattcaaaattcaaataattgtatgacatggttataacaaaacaccttcctaccccatccatagtatttatttagatgaacaaattttctcagtcctgtatctatacaaatgaaaactagatatagtattgacgtttagctctgtttcagtctaggaataagtaatatttaccagtggacttgtgaacaattaataaccataatcaagaagtatttttaaaacatttagcatcttaaatttatatagtagagatggatagggtgatccatgaaagatgtttaattatataattattacatttcgctaaaaacttgttggtgatgttgaatggaaaatcaagtcaaaaataaagaagaatgatgcaaaccttaaaaaaaatgagcaaaacttatcttgaaaagtcatgcagaggagcataagaatctagcagaagctttattgacctatgagactttaggtgccaaagagattcaaattgttcttcaggggaaaaagttggaagtgagatgagaactctcttgatgtggatgctttgctggttttattgcaagaatataagtagcattgcagtagtctccttttgcaatgctttctcctcattattgacgttgtgtaatttaagggtgtgaaacattttgtcaatattttgtcacgtttacccaattttggttattctcattatgacacccattgcaaatcagcatcccatggcaaatatatttttaaaactaaagaactatcaggattaaagacagctcatttgggaaatgtcaattagttatgaagttgaaagtaactaatgattttatggttggttactctactagaggtgaataaaacttcagcctttagccttctatatacatcagtggaaacttaattaagatgcattaattatgttccagattgaccatcaataaaatgtttttaaatctaaatgtagagaattgtaagcatacagttgcaacccgaatttaaatgattataaccttttggcatggtgtgatggctcacgcctctaatcccagcactttgggaggctgaggcgagtggaaggcttgagtctaggagttcgagaccagcctggcctacacggcgaaaccctgtctctactaaaattaaaaaaaatagcctcctgtggtggtgcacaactgtaatcccagctactcagaaggctgaggcacaaaaatttgcttgaactggttgcagtgagccaagatctcacaactccactctagcctgggcgacagagtgaaactttgtctcagtaaataaataaataaataaataattgtaaccttttaaaaataaaaaaacccaaacaaatatatgtcctttttttgtcattattcatgatagctaaatagtgaaaacaacccaaatgtccatcaattggtgaatgcataaaccaaatgtgatataggcatagaatggaatattcttcaacagtagaaaggaacaaagaccaattacatgctctagcgtgcagagaccacgaaaacattttgctatgtgcaattggatttttgccattttgttgttgtttttaatgtagtacatttattttaatttattatttttttaaaaaaaattcaatagcttttggggaacaggtggtgtttggttacgtggataagctctttagtggtgatttttgagattttggtgcattcatcacccgagcagtgtacactgcacccaatgtgtagtcttttatcgctcatccccctcccattgttccctgtgagtccccagattccattatatccttcttatgcctttgcatcctcatagtttagctcccacttatgagaccatatgatgtttggttttccatttctgaattacttcacttggaataatggtctccaactgcatctaggttgctgcgaatgccattattttgtccctttttgtggctgagtagtattccgtgctgtgtgtgtgtatatacacacatacacatacatgtttttcatatgtttgtggaccgttcgtatatcttcttttgagagttgtcacaaagggaattggatttggagggaacaattttatggccatttttcagtataatcatcgggtgaagacagtgtctgttcggccagtgtcgctttaatccattacctgtagccaggaagggagacgtttatcgcagagataggcaccaacctggaatgctttcctcaaaggcgattaactgtagtgtgaacccgaaatttcaccgcagtttggtcctgatttggcacaagatatgctttatccactgatgtgaaatgtccaggtgtttttttgtacggttttgttgctgaaagacacaataccctctaatctaaggcatcctctccaaatcccactgaacaataccctctaatctaaggcatcctctccaaatcccactgaggcacaggagtgacactagagagggggtcacggagcttcctgagagagattcgcctcctgaaccctgggcagatcctccccaccttgggatctctgtgaacctctggggtcttctattcaatcaggaccaagttgtgaggtgggattccttccaggctacagtctcccctctccctctttcaattttatcaagacagatcagaggtttgtgggagggagtcatggcgtctcctccacagcccccagctgtgcagatggatgaggccaccgttcctggatggagtaaatctactgggaacctgggttctccatcacgaggttgtcccgtcatcagccccaaaagaaggggaactgccctctccgggagcttgactttcatttccccaaggctgggactggggcaggcaccaggctgtcttcagatacttcatacagaaatggtatctccctgacccttttctgcgatttgcctcatctgtcctcatctcatcaagggtcaggacgtaggagccgatagacccagcacctttctgagtctgtcctgtccaagtgagggtgagtgggggcttgttcttcttctcagagcctccctgtggggtcctcttccctccttcagcctgtccatcaacacagcattgcgggatccttaccatggcatccagccctggagatgcttcaggaaagttgcaggtccatgctgcaggacaggctcagatcagcagagacgcatctcacatcgggctgtgaaattcaagttgagctgcaattggcaatgagaagaaaaaaggagaaataaagaaatgctgactcttcttttgtctttggagtatgggttttatttcttccagtttccttcttagacttcccttcttttttttcttcctattttttttaatagtgttcaggtccccctcccttaaaagtaacctctgagtcattcctgcctccttggcgtccctcccacccccagccccgcttccttgggcattcccctgcatctcagtctgccttcaaggttttgggaacaagtacttgtcttgagctctgatttgggggtgggatagggagttaattttttctgaattgctcaccttcatccctgcgtgcatgaccttgggcagtaagtcccatctctgagcctcggtttcctcatttggagcctgttgtcatgaacccccctcctgagtggttttgggggccagtggtgcctgggtcatgggagggcctcagtcatggtacatttccagaccgggttaagtcttgggggttgaaacatgagtggatcctggtgttggactgcacagtcacggtgagtgacttatgtgctcaacagcccacatctgctcctaacactgggaaaacctacttataatgtgtctgaaatatgtagccatggtccaatgaagaaaatgagaaatgagacttcctgtcataggcaggaaaccttaagaagcagaagatgccagcgccgaggggctgctggtgacttgcaaagctgggggtcactaagggggaggtttctgcctctgtatgagacagaggagaaccccagggccctcacagacagggaggggtcggggttttggatgaaagtgggaagttgtggctccttctcccctgtgtttgtggatggcactgggatatctctgctcattgactcaggtccatggtcagccctgagccgcctcctccatgtgtgtgaaacagattcactgcagcgttgtcacacatgggcgtctgtcccacatgcgagtctgaggctcacactggaccctccctgctggttacagccctgagtagactcatgtggcactggcaggtggaaccatctccccttttccagccttaactcccagcacagccctggtggaaaccctctctggaagatgaggcatgtgggaagcatgtgtccaaaaatgacaaggagaaggaattatcctaatgatcaaaagtgctatgatgggccaggcaccgtggctcatgcctgcagtcccagcactttgggaggtcaaggcgggcgggtcacttgggcccaggagttcaagaccagcctgggcaacatggcaaaacctcatctctacaagaaatacaaaaattagctggatgtggtgtcatgaataatggcctccagctcatccaggttgctgcaaaactcaatcccttgtacatcagttgcaaaaaattaaaaatatctaagaatatacctaactgaggaggtgaaagatctctacaagaagaacaacaaaatgctgcagaaagaaatcgtagatgacacagcaaaatagaaatatatcccatgctcatggattggcagaatcaatattgtgaaaatgatcacacttcccaaagcaatatttaggttcaatgcaattcccatcaaaatatcaacatcatttttttcacagaattagaaaaaaatcctaaaattcatatggaaccaaaaagaggatgaataccaaagcaatcttaagcaaaaagacaaatgtaaatttaataaacatatcctaggctgaattgtagggggtttgtttttgctcacttcaacctccacctcccgggttcattcaagtgatcctcctgcctctgcctcccaagtagctgggattgcagcgtgcgccaccatgtccagctaatttttgtatttttagtagagatggggttttgccttgttggccatgctggtcttgaactcccggcctcaagtaatctgtggcctctgcctccctaggtgttgagattacaggcgtgagccaccgcacccgggcacattgcctctttttctattctcaagaaacatttgtgatgctctgggtgtgtttgtgtgtttcattagtgcgtcaatatttgtaagaaatcaccagtgaaacttcctgaactggagttgatacgatgggaacatttttattacagtcaatgtttttcacacacacacacacacacacacacacacatatatatacacacacatacacacacatttaaaatgagtcagattctctgattactcttacgttcattatgtaaactccagttttgaatatttcatccatttaatctgcattttctagtatattggtataggtttgcagcctgttctggggttagtttgtgaaaatgtgtgtaggatctgctgggctgtctgctggctcactcccatatggaaatgcgtgcctgctctttctttctcttgctcaatgtagttaggatttatgactgtaattaatattttcaagaatgagcttcattggctttgttgaattttcaagttttggtttttcctcatgagcaactcttcttcttcttattccctttcttacaccttcatttggaataattggttattctttttctaaattccttatacgaaagccaacgtcattcatttcctagtttttttttttcgtttctacttttttcatttgtggtttgtactttttcaatttcattgtgtgatgtgtaatatttatattgtgattcagtttaaagcacattcttacttctgattttagttttctcggttaactcattgattattgagaagtctgttgctttaattaaaaaatgtagggatattagttatttcgactgcagaatcaagtgagtcccaaagttcccagcatctcctcatggtctttgttaggggtccaggctgactggggttcattggtgtccactgggggcagctcccgtgccttcagcagtcctgagtctccttctactgagtgtggagtctgcgtaccctccgggctagtggatggccagggtggcgtagatgctgggctcagctggaggttccctttcctgggatggaggaggctcagttgccttccgtctgagggtcaagctgtgcagctgggcgtaggtcacatcctggggggcttcagatgcagcagcctgcagcgggggagagtgagaggtaaggaacgtggtgggggtgggggaggcctgggggcctggagaggaaaggactctctcagtgtccatctgtctgtcctcttctgcctgtctgtcctttgtgtccaggaattccccggacagtggggagggaggagaggccatttctctcctaggtctggagtgtttcaccggggcatatgtcactgcctgggggtcttcatcatgtgggctctgctggagagagacagtggtggggggtgtccttgagtccccctgacctcctggagtcaattttcctcactgttcccggggtgatccgattacatccctttcccgatggaatctcagggacgccctaaggccgtggagggtctggccgctcccttcctgtggttctggcctctgctcctcactttgaccttgcccatttggctgcagcctcatgggccttcccgcaagagctcgctgctgcctcggggcctttgcacggctgtttcctctgcctgcaggggctcgtccattagaggatcgtgtgccccactctgtccaggcttctcagatgacagctgagcagacagccctccccttccattcagactggccccactgccccacactctctgccctttccctggtgtatgttcctttaagcacgttgcactcctggacatggcgcatttatttgcattttgtctcccaccatgaggtgagctcaggaggcgggggcggctttgctccctgct
